United States Patent Application Publication US 2004/0166490 A1 - sequence listing, part 3

SEQ ID NO: 139 - DNA, 55875 bp, Mus musculus
  misc_feature (1)...(55875): n = A,T,C or G
gttggcctcagcactcgacctccaggctctgaggtggagtgtccagtgactgctccataggagggaagcatgagagattagcttctgggtctgtcagctttggcacatgagcaatatcctccgctgtcggagtcagttctcagtcttggtcatttctgttatcaccctcaagaagacttttttccaagtcagaagagagaaacagagacaggctcttgcatctgtccagcctgagcctggcagacatctcattactatctggagaccagagatggagaggggaggccgaggagacagctcccagatgtgtgtgtacttgatcccacatgtgttgtggctgtctagtgtgaaggagttttaatccaacaacatggctactctggcaagagatcacattcaaagaccttctaggtctgtgtggtccagctggaatacagacatacctttaatcccaggagacagatgcaagcagatctctgagttcaaggacagcttggtataaagcaagtttcagataaagaaaagctcaggttctgtcatggtgacacatgtctttaatcccagctctcaggagacagaggcatgcagatctctgatcttcagtcagttaaattcaaatcagtcagtggaacagtttagagttaaggagttgagaggtagtgaatagagtggaatgtatggcagttcagtttgtcaagttcagagacagtttttatggggacagttttacaaagagggttgcagagagaataaactagacacatggggaagacagaatgagccagagaatgagaaggagccagaagattagaacagattgccatagttagtttgaggccaagcagaacattttttttttcgagacagggtttctctgtatagccctggctgtcctggaactcactctgtagaccaggctggcctcgaactcagaaatccgcctgcctctgcctcccgagtgctgggattaaaggcgtgcaccaccacgcccggccaagcagaacattttagtgagaagctgacagaagtcagattgaatcagtcagcttggagaggagtttggggccagaacagctgagctgaaccagccagctagagcgcagaaataacgaggaaggatgatcttagcagtaagcccctgagaagacaattacatcatgtgaataaaagatacctttacaggttggggatgacagtactgacagccatggtagaggtagcaggtgagttgatccagtagataggataagaagaggcaataataatccgggcataagccaccaagcctaggctttggctgtttgctttgttcctgtggggctatctgtggggataaggactttgagaattgctcactggaacagaaaaggcagcgacctgaggaaacccactttctagctagagtggaggctctgaggattgacagttaatccttccctcaacactggaaagtccttacctggccctggtcagagggagagggtaaggccgactaggctgcagggagtaccagcatacgtcctgcttcctgtgatcaggagtgtgcacagggcaagggaagggacagggaggcgaggcacggggatggcccctagtgcatgtgacagatgacagttactgatgaactcctgatccttgtgcctcttcccccgagtgctgggagaatctcaggcaagcgcatctggcttcagttctgaacttccatgttagtggaagatatgtgggcatttgttggtggcttcttccatttaagttaagatctggcccatgtggctgctcacaattctctccagttccaggtgacccgataccatcttctagtctctgcaagtactaggcacacactagtaaagctaattaattaattaattaattaattaattaattaaacaaaatgtaaagattattcgtgctgtggcccagtattatcctgtcgtgtacacagagtgcctgtctccatggtgatggacatcacgggttcctgttttgactgttgtgagcagcactgctttaggctatcttatacaagtttagtgggatctatggtgtctttcctcttgggcatgcaccttgagatggagctgcttgatcgtatggtgactgtgatggtttgtgtatgcttggcccggggagtgacaccatttggaggtgtggccttgctggaggaggtgtggccttgttggagtaggtgtgtcactgtgggcgtgggcttaagatcctcatcctagctgcctggaagtcagtgttctgctaggagccttcagatgaagatgtagaactctcagctcctcctgtactcgataatggactgaacctctgaagctgtaagccagccccaattaaatgtcctttataagacatgccttggtcttggtcaggatgtctgttcacagaagtaaaaccctaactaagacagtgactgactctatgtttagtcataaaaagaacttctggtggtggtgcacgcctttaatcccagcacttgggaggcagaggcaggcggatttctgagttcaaggccagcctggtctacaaagtgagttccaggacagccagggctatacagagaaaccctgtctcggaaaaaaaaaaagaacttctgctgttttccaaagtggcaccattttgtattcccaccagcaatggataagggttccagtgtcttgtgcacatgtctaccactgagtcttatccctggttcctgcttaccttcctatctgacttgggttctagtgaagtaaaaagtttttaaatcctactacacgttactttaaagtcaataaacttagctcagtggaaccattttacaagtcagaaaagaatatagtttgtttaagaaagacacttttcataacagttaactgttaaataatgactaatgtaaataacaaagttctgactatttgattttgtgctttggggctttgttggtgactgtagtggctattcctggttgtcaacttgacaatatttggaatgaactacaatccggaattggaaggctcaccagtgaccctaatctggaggcttggagatccttatctggatattggtatggagatcttgagccatagtggctatggattccagaagattgaatctccgagtttaaggaacacacctttaatctgggctacgcctttcatctgggattaaaggtgtggtggaacacacctttaatctgggctacaccttctgctggagacaatataaggacattggaagaagggagtctagctcttgctcttgctcctttgcctgcttgctgcgtgagactgagtaactgctagatccttggacttccattcatagctgcgactgaaccattgttgggaattaggctgccgactgtaagtcatcaataaattcctttactatctagagactatccataagttctgtgactctagagaaccctgactaatacagtgacactgggtctcaatgagtagtcctggggcctggagctgctgctgccccgagtactgggattgaaggcatgcactgtcatatctggctcctttgttccttttgctgttagaactggtaataccactgtttgggaagtggaaactggagaaccaggagttcaaggtcatccttaacctcatactgaattcaaggtcagcatgggttacatggcacctcatctcaaaaattcatagctagatattagaataaaaaggttttttcttttcctaagaggggaatttccactgataagaagaaactagatggtaaatgcctctctttctgcctctccagggctagggttataggtgtgagcatgagcaaacatgtctggtttgttgttgttgctgttcttgacgttgttgcttctttagacagagtctcactgtacagccagaatattggctctttatgaggtcgggagatctaaactcaggtcctcctgcttgagcaggaagctcttagctgcctgagccacctcccctgtgcactcacatttcatgtaattgtgatgcttctttgcagttataaaaatctaacagtccaggtcatccagctacacagtgagaccctgtctcaagcaaacagaataaaataatgaaaacataacgtccagtgttacaggaggacctttataacaacacaatgttctgtaattagtgggaggcttataacttctttttgagatggttttagcagccccatctctgggggtgacgtcagctgacgatggtagagttgggtggaggttgctgaggatactgtaagcctccattgggagcttgagtctcctaggcaggcacttcaagctgtgctgccccatgtttgcccacaaaccccctctcagggagaaggcagcaaggtgtgtgtgtgggggggggggcatggaggatggcagtgtagtgggtgagtcctggtgtggtcacagatctgccagtcagcctggctttacctcactacttccctcagagctatctggcccttgtgacagatccacacacaggtgaggagagaatacagtgtcccttgctgagaatagaagcaggcctggaggatggtgtgtgctcttagcagactaggcctggaggcaggtttaaggagatttatttaaaaaacaaaaaactggtggggtagagtgtgatgatgagtttctttaaccccagcactggggaaacagaggcaggagggtcaagaaaaactcaaggccagcctcagctacctgaaaacctgtcgaaaaacaaacaaacaaacaacaaaacaaaaacctcactcaaacaacacccccacctgtaaccaggatagccggtgtcttagggctttactgatgtgaacagacaccatggccaaggcaactctgataaggacaacatgtatttggggctggcttacaggttcagaggttcagtccattatcatcaaggtaggaacatggcagcatctaagcaggtgtggtgcagaaggagctgagagttctacaacttcatctgaagatggctagcagaatactgacttctaggcagctagggtgagagtattaagcccatacccacagtgacacacctactccaacaaggccacacctcctaatagtgccactccctgggccaagcatatacaaaccaccacagctgggattccacatctgttgtccacattcatctttagaaaacagttcacttatgaagtcctcggtttccttgtcaaataagcaagagaagcagagcctaagactacaaaatcccttttggagaagactaaaaacaatcttacatcttttctttattctttaaggcttctaataggcaaactttaaggagcttaactttaggtaggccagagggtgaacagcctgaagtcgcagccctggggaggtgacagcagtagggttgcaagtctgagcctgcctgggctccaaaaggtttaattttttcaggtcaaaggtaagatgggcttgcttgctggttgagtcagccaagggtttctccctctaggggacatgaacggtagctgcacttatgcagaagggggattgagtctgggggccccaagaagcgtttccctaaaccaagttctataactccctcttccctcctgtgcaactcctcagtgcctgctgtggtgggctagacaggtgtcccacagtcagtcctgtgtctactgagacctccctcagtgagagtcctggaccagacctcagcctagtcttgacagcagctatggagtctttatcaaatcacttcacctctctaagcctatctgactctcaggactgagaaactcaaaagcagctatattcttgagaaagaaaaaaaaaacaacaaaacaaaacaaaacaaacaaacaaacaaaaaaccttgcacaatgtcccaagagaagtgccctggtttggatgtgaagtcctgtgttcctttgctgcagtcacacgggcttgtctgaattccctgcacagggtactttagcctcacctgccgttcatttctgcttcctggaggccagatgtctccattcccaagttgagatttatctgatacactgttacaccaataggagggtcttttcctggagttggcaggcacccaggaggggctggtaactcctggggacaggtagcaggagtctgacttggggtgggaggttcatggggtgggggttgtcagcaaagctcatacacacaggtttgatttctctcctccttaacagtgttgtcgtaacaacctggaatgttggctggaaaactgaacttccactaagtgtagagttcagacagcctccaaggaggaaagagactgctcagagccctgaggaatgtctttccttaccttagatagagatcttcagtatgtgttgggcccttcagcaggagatgcagagatgagttcttcagggtgacagggaaggcagggtggtaaacaaagtcacatggcatttgggaggaacacaggactctggcacccaagctaaccagtggatgacagctttcttggaattgaggaaagagaccattgagttttctgaaaaagacagccaagtccaggtttggcttttttttttttttttttttttttttttttttttaacttgtggattacgttgggcccacacttggggtaattttatctttccttcctggatactgaggatacatgtgttcacagctatgcttggctttttttttttttaatagggtcttgtccagcgtggccagaaccttgccacgtttcccccttagcctcttcagtgccagaattacaatcatccaccaccgtgcctgtcagagacgagtgtgagggcagagtagggtgtaagactaaaggaaaggaaggcctggccagaggataagcttgaacaaggcatgcagattaaaaaccacggacatcattgtagaaacttacctacacgcaaggctctggtacaggaaagagggtgggaaagtgaaggtggactctctgtgtagccctggatgacctggaactcactctgtggaccaggctggccttaaactcacagagatatgcctgcttctgcctcccaagtgctgggattaaaggcaggagccatcataccaggacttgaagcacaacactaatactttgtatattataaattcttaccacacaaatcagtaaaaaaggctctgagatgaagtagaaacttgagttctttggaaagtcagttgtgtggcatggtattttgctggggcaaacatgtgacatgaaggagtattttcctgaagcagacacaaggtaaaaggatgttttgctaaagcagacccgtgaaaggacccatgatgtaggattcttctctaactacatgcaaggatcagttcaccttacatttcattgttgagctccatttgttgtgactccatagagagaaacatactggaaacgtttctagtggtgttctggtggcttcttgctgcttccatggactcgggcagagtgatgtcagctgatacagactcaagtggagttttgctaagacagactcacatactgaggcgagacccatttgagaacacgttatgtttggagagcggataactaagactcaatggacagtgggaaagggcttgcttgcatagctagctttgcaatgcttcctggtcttcttcgctgatcttcactttgttaagagaagtaaggcaaagaacttctccaggcctaatcactcctgctaactcatgcagattcggccgaggcctggctgtttctgctaggttgtgccaacactgctgttgatttgtgtttgttatcctgacactaccgacctggactgctgctatattcatcaagtatttgcaagtggatgggatttgctccaaagaacaatttctagacagatccacctcctaatatcctaactacctaattcctgtatcctaataactttccatttccactgcctctaggagggaggttaaagtgtttaaaaaccatcattaaaattagggttgagaaatatctaaacaacacagagaaattaactataacttgcccaaatcctacagctatcaagcagtagacctgggatgggaactaaactcatctgactatggaacacccccccccccacactccaggatcaaaacggggtggatggggggaagccacttggccagggttgccgggtcgtgtctgagatgtctgctcttgccttcaacattccttctatctgagctggcagccttctgtagccttcctgtttcaggccagcaacttgtctctctgcaattattttcaggtctctgtttaccacagaaaggaaggaggcagcacaatgagagtctgttggaaattaattatatttttaagatagggcaagttccactatgcttgcctcgaactctggatcttcctgcctcagcctccagagttttgggattacaggtgtgtactaccacatcctcttgctatttaatcccattttaaatagcaggagaaaaaaatatgtattttttttagacagggccttagactcacagctattcacctgcttctgcttcccaaatgcctgccccaccacagggagagagaacaaccatgcctttctctccgacttatagcgtggctgaggaagtgccatcaaaaccaatcccattgtcctgggtacaggtttggttctgacatccacagagagcggtggatgcctaggtctgaggccagcatgttgcttaaataaggtcatgtcttatttaggggttcagccagcacacacacattccagttgccccatggactctaatcagctgaaccctgaaatggaagaatacattaaaacatactggtgtaggtccagggctccccatctacattttcttttctttcttttttttttcttatcccttcccttctccctcttgctccggcccggctcgctcaggcccataggttttatttgtttctcattacagatggttgtgagctaccatgttgctgggatttgaactcatgatctccggaagtcagtcagtgcgtttaaccgctgagccatctcaccagccctaaattttcttttcagtgtgtttctttccctctgcatttgcatgggaagctgccctgtagcttcaagctctgtagcttggaagggaaccttggtggagtctggtaaatagcaaacgccggttcctttgtgtccagtcaagtcatgatgggtaatcaaagccctactccttgttgagcagttaggctccaggtacatcgacagtgtttccaggaatctttatcatgggcttaaaaatacatctctaataggtgagaaaactgagacttccggatcgggatagcaatcttgaggagggtaacacatgtgtctctgggccagactcaaaagcgcacactggtttcgttgcctctgcagtagccttcaaagagctgctcctccactggaagatgagaggaaatctttttctcaggttatggacgcctaagttttccttcagaccaattaaatcacaatctctgggctcgaagcagacatcggtgtcttttcggattccctgtttgattcccgtaagcacccaggacactgacctgccttctactttaacagccagagccactggctggcgctcatgaaagcaaaactcaagcggaggcgcggatggaaggaaggagggggatatttctccttatctcagcgtcaaaacctggggaggggccctggtgggggtccctgggggctcaggtgtggcgcggctgcaggaagtaaccccctccggtggcccggagcgctggccgattgcgccatcctactgggctttcgtaaccgcgagccggggctgccaagaggagcttcagcaccggttcctcaaatgtttcactgttgccaggacggccggctgctgtgtgtcacgtgcatgtgggaagtcgcgcccacaccgatctgagccacgccggggcgagcgctcgcagtgcgagctgagtgtggagcccgaggccgagggcgactgctctcgctgccccagtctgccggccgcccggccccggctgcggagccgctctgccgcccgccgtcccgcgtagaaggaagcatgctgaccgtcggctgcacgctgttggtcgccctgctggccgcgcccgcggtcgcgctggtcctcgggagctgccgcgcgctgggtaagaggaacccggagcgggcgtggggaatgtgacactgtctggttccgttcgcagagtgagccccgccggtaccggctgctagcctgggctgactcacctgtgctgacgcggtggaggttcgcgcgccccctgttgcgtctagcgcctataactgcgtgctcctgtctgtgtctggccagttacctcaagtctgagtacaggacagtgtgttttcctgaaacctgactctggtgtctggttcccagtgttcccagtcttactcaactgcatcccgggtcgctccaaaaagagatacccagagggcgcgccctagtggaacagtagtagtcccttctggagagtcctttatgccactggctctctctgctttagttgtggcacctcgcgtggctttccttagttctactacattccatgtcgtgtgtaatgacagtgacccgacggtgaagggtctgacatcatgggctctgagtcatgggtgttcccgcctcacaaacttactcctttagccaactagccctagcatgcagaatgccaacacccacatccatcccaatcctgtgagtttgacagcaaaggatgtgggacctcttggaactgtgcctccgccccctgccccagccctccctgattagcaggtggaccaggcggagggtagggtaggggcactgtgtttaccttccttgcactctgccttgtaggtctaggcctctctgtgggctctggcttcaggcccagcagcctgcctggtctcttctggaggaactgggagactgcttctctacaggttattttaggggctgagggcttattcaacaacatagaaagagccaaaggacatgggggagatttatcctgtgctggtcgtggggacagtggcttccaggctttctttctgcctggaaggtagaattcctcaagcttggtttgttacccctacctatattttctttatatatatatatataaagaaaatatatatatatattagacaggctctcccataacccaggctggcctcaaacttgtgcctcttctgcctctatctcttgagtgctgggatttcaggtattaacccaccctgtattttacacgtttttaatcctctacaggattgacataaagctttgggaggagcctgaggttcagagagatgcaatgggaagcatcaggcccctccgtgtctcagtgttctcctgtgggtacagctgagggcgtctggggtaggctgagcaccactatcatctggtgggattctgggggagaagacactgatgaaagagaagatccccgcttagctgttcatggtgccaggcaggactgaggtcctctcttccatcttgggagagcaggactgggcctctctgcctgtctcagttactactcaacataccccagcgcccccaccaccacttccctttgttcctaaggagctgcaaggcacttcggagacagcgagttctgttttcctgtggttcagaaaggacacccaagggtgggggtgtcttctgacccaaacagcctttagaaggcagaactgggagtctggggaggaagtgaaagccctgccagtttagaaggaagaggcagagaagtccccagcccatctcccacacccacacttgcacagctacaaactggagagtgacaatcaagaaacaagcaccaaacaggaagtgtggagcaaatgactgagatgtttggctttagagaagtgaggccagatggagatggctctctgggggggaacccatgggtggaagatatacataaacatatatatatgggcaggcgagatagctcagcacacgcacacacacacacacacacacacacacacacactctcctccatccatcatccttagtgggtttttgccttcatgtattcatgtctgtgtgagggttccaaatcctatggaactggagttacagttgtgagctgccatgtggtgcagggattgaacctgggtcctctggaagaacagccagtgttcttaactgctgagccatcactccagcaccaacaggtgggattttcatagtctgcccctccagggcctgctaggactcctgtgtcttcttccacctggggcccaggaccagctgggactgaggcttctgccaggtcaaactttctaggcgctgctgactgaggacaggctgggcatgggtggcttcagtccccctttccttctgtaaggcaagaaaacacgcagcagcaccgatgcctatgtatctaaatctcctcctgacttctgaattccctctgggacaacctctttcggtctacaaaacctacctgtattcctagcctcaccctgaatcagtatttttctgaaggatatattttttatctagcatcaaatttcggctaggaaggatagatctttgtaaaaaaaaatcacaatttttaaaacattagggtttgtgggttttttgtttgtttgtttttttttttttttttgatattttgagacaggtgtttctttgtgtagccctggctgccctggaactcactctgtagaccaggttggccttgaacttagaggtctttgcctcctgagtgctgggatcaaaggccacggtacccaaccaaaaatgacaattcttgacccctggccactcattaaacatgtatcagaagagcagagagtgaggtctacactttgaaaaaaaacaaattgttccttgtggcccctgggcactggcttgaggacatttgcctaatggtcaggatgagtaaaagaccttcttcccctgccaggttccctgtgaccagaagcctctccccgccttggctctgcccctccccttgtttattcgttgcaacacatatttatgtattccctgtaaagcccttggggaccaagtgggatccgtcatgcacactccaccctataaaggatcctgaatgtggccaaaagcaaatcctgagacagagccagttcagtctctctgacctgacactgggtaccaactctccagggacagattgtctcagcagtcagctagacagaggaacccttctgactgggaccctaaagcaacaggagcctgcctgttctctaccccatctgactggcatcaaactgtgcaggcgcaagtgtggccatagctgggttatgtaaacaaagtaacttcagagcttctggcttcaaacagatgtctccttcagcaagctttccatctgcccctgcaggcctgagtgccaccactcagtcatcagcttgaatccagggctaaagctatctcagatgagccagtaagtgagtttaagctattaaaccttaaattaatagaaaaagtaaaatgggcacatgagatggctcagcagataaaaaaaggcatttgctgnnnnnnnnnnnnnnnnnnnnnnnnnnnnnnnnnnnnnnnnnnnnnnnnnnnnnnnnnnnnnnnnnnnnnnnnnnnnnnnnnnnnnntgttactcccaagggtttctgtttctctggcctctacatatgtactgtggctagtgcatgcacataaacaaacaaacaaataaatgtaattaaaacaaaagctgtgtatggtggcacatgcccttagtgccagaatctctgtgagtttgtggtcagcctggtctccacagcaagttcaagaaagaggaaaaaagggtgatttctagatgtgcttgatggtgtaactcatatgggaacttgatgcagggggattgcaagctctaggttagcctaagctacagagacagggttggggtgggggtggggagtaggggaaccctcaaaaaaaaacacaaacaaacaaacaaaaaccaggacaaatctctgtccttcatcacgcctgtcacttgcagtgcgcagtggctagctgtggctggtgtggctgtgcatgtctgctcatggggctttcccatagcggaggggaagtgtgtcgggtgaggggctagagagctatgcggtgtcttccagacacctgttccacctgtatgcatggtgctctgagggggcattggagcctctggaactggagttacagatggttgtgagctgtcttgtgggtgctggggatcaaatcctgcttcattgaaagaactctctctttttggagacaaagtctcaccacgtagccctggctggcttggaactctctgtgtagaacaggctggccccgaatgcacagagagcctcccgcctctgtctctcaagtgatggaactaaaggtgtgggctcaggaggtcatcagtgacggtttatcagtgagctgtcatctttctagtcccagagctgacgctttacctgaacctcagcagctttcaccattgcgcttgtctcttgccagctctgtctgcaggtttctagcacagggtgctcctgaggccccaacccaggagcccgttctctgactcacttctctccctacctccttccagaaaatcattctttgggcttccctttctgtggtggttacagtaactgtggctctgagtatcaacttcatttgaaaaattgtgtcagacccttggcacaacagtgcagctttgggtgagtggggtgccagcccgctcttggctggacagggtagctacaggacagcaggtggggttggatgagtgatcagaggccattctggggcatgtgggaactgagacatctatagcacaaccaagaaaggatgctaaatcaggtctggtggactgcaggtttcttatcacagtactcaacagagagaggtagaagttcaaggccagcttaggttacatgagacccccggaagtaaagtgtggggagagaatgggagtgagaaatgcctatggatccctaaaaggagtcagcaggaacttgggagtgagacctggacttgagagtcacctacaggcaaatccctccatacacacacatccctttttctcttctttaaacagttgcctcgtgtttcccctgggactgaccttggactcatgctggccctgaatgcacacagatctgcctgcctctgcctcctgagtgctgagattacatctggccagatgttactttaaacttttagaattacccagcccagcctgctcaacaacagaaagaataggactcaggggccggagctgaggtgctggaaccttctgatcagaggagacagaattaaggaagactgtgaccatgaagtgaacaggatagtgtaaggaggactggtgtcttgagaacccaggaggacactgtgcccatgagtggagtgttctttttgtttgttttgttttgtttgtttgttgtttggtttggtttggtcttttttccagacagggtttctctggtgtccttgggaactcactctgtagaccaggctggcctcgagatctgcctgcctctgcctcctgagcgatgggattaaaggtgtgagccaccaaccacctgctcctcctcaaatactcctgacaagtcaggcaggctgacccaggcttgaccagtgggtttaacaacaggcaggccactgttgttgactttggtctgtggagctttggaggaatggtgggagccaaagacaggcagagagacagcaggcctggtcagctcttttgggatttcagagcatatttgttggctacagttcagttgacaaagaggagttttaaacagactattgagacaggtgtgcgggaaggatccagggacaaaatgattgaaaaaagtaaatactggccgggcatggtggtgcacgcctttaatcccagcacttgggaggcagaggcaggcggatttctgagttcgaggccagcctggtctacagagtgagttccaggatagccagggctacacagaaaaaccctgtctggaaaaacaaaacaaaacaaaaacaaaaacaaaaaaaaagtaaaaactggtggaacaaagtcctcgagtaagtagtgaggagacaggggcccagaaagcctagaaactggtctgcgatcatacagcaaggttgtgacagaccgaggtctgtgcctgcatttgagtttttgttttatagtgtgtgtgtgtgtgtgtgtgtgtacaggcaggttcacaagcacatatgtgcacatatatgtggaggtcatatacaagacacacatgtgaaagccagatatggtcactggtgtcttctattgttctctggtttatttttctagacagggtctctctggccggccggccagcttgggggaatccgcttccctcggcccctagtccttgtaccttcacttggctttcagaacacacacccttgtgctctgctttttgcacgagtgctggggcctgaactctggtgtgtgtggccagctttaccgactaagccgtttcctccgcccccgcccccttatattatatatgtgtattgtcaacaagcacaactcttccagggcacaggtacaacaagatcatttttcttcctggtgtccttattagagacttagggatagtacactgatgagtgtcaccaagatgatccccttcctgtcccaggaagttcccattgccttcttctaagaactgaagaaaacactcctggctgtgatgtgggttcgagctggtgtggtctcctctcaccctgccctcagcatccattcacatcacttttagtccgggggaggttttgtaagcacaatggactcttccatctccaggagaggccccctgggctttagggtttagaagcctctggggatatcactgtagacctccaaagacggaacagtagtttctgatactgaaacaaaccaaagtagagcctcagctgctgccggtcttatgcgcctgttttgataagaggcagaggctgtggtgtgaaggctttgtcgcaggagtgggaaggaggccgcagttaataatagttacagttcacacagcagctcagatgggtgaggttaggtgtgtcctgaaagcagcgccgagggtttcacctcagccctgacatgagagtaatcctcacagcaacattttcaggagagtacggttattatcttcgctctgtggctggagaggtagaaagtcctagaacttgctatgtaaaccaggatggccttgaacttgcgataatgcccccatctctgcttcccaaattctgggattatggatgtgtgccacctaaacagagtttatttatttattcactttagatatttcattatatgaatacatccacttttttgcccagcccctttcctacgttctgggcatggaaacaagggccttgctcaagaagggcaagcatgctgccaactgagctattcgcccacacccaatctctttagaaggacatttgaccacatcccacagtgctgttgcagacagtcctgtgggaatgatttcagcacccctcgcacttccaaagcatacccacagggtaaaggcctccagggtaactgacagttcaaatgcccacgagctttgtaactggaaaaggagaagtggtgtcaatttatgctccagcaaaatacaagcacgcccatgtccacaaactccctcggtgtgttattaaagtggcatctggtccagcatggtggcccacacctttaatcctgcactcagtaggcagactggatgagtctctgattttgagaccaacctggtctacagagtgaattccaagccagcagggctacaaggagaccctgtctcaaaaacaaaacaaacaacaataacaattttaaaaaaaccaaaaaaacaaaataaaacaaccaaacactggcctctcccaagaacagtctgtgctccttgcacacagcttctctgagtgaggctggatgggtgtttccctgtgcagcagacatttcataacttatttgcataatctgcctgcttatactgctcagttttgactgagctgtgggctttttcatattgtttacaaagctcttactatataaaggaacttggtcttctctgatccaagtcgtaaatattttccagtttgtcttttattgttctgatagcaaagtttttttgtttttccccacgcagatttgcttttgctttttttcattttgttttttaaacaaggtcttgctgtatagcccaggctagcttcaaacttccaagcctccgtctcagcctcctgagtactgggattgcaggaatggcccaccattctcagcaagattgttcttaaagctacagctgaatttatatgacctctgaatttctgtcatgtttagtgagatcttcttcatgccaatatcattttattttatttatttattttttaaaaatatttttattaggtattttcctcatttacattgccaatatcattttaaaagattctttttttccctttatttccaagagtttacaattaaaaaaaaactgcacctatacatctagcatttgagaaacaggattacttggagttcaaggccagctaagttacagtgtaagccctgtcttcaaaacctaaataatgtgtatattttaaagagactggagagatggctcagtggttaagagaacatactactgttgctgaggaccaagttgccagcacccatgatgagtggcttacaactgcttgtagatccaactgcaggggatctgatgctgtcctcttctgggatctgtgggtacctgtactcatgggcattaacacacccacacatctataagcacaaatatacatatacatatacacacacatacacaacacaaacatacacacatatggacacatacatatatacacataaccacacatacacacacatgcacacacacatacacacatacacatacacacacatacacatacatacacatacacacatacacatacatacacatgcacatatacatacacatgcatgtacacacacatgcacatatatgcacacatgcacacatacatacacacacatgcacacacacatatacaacacaaacatacacacatatggacacatacacacatacacataaccacacatatacacatacatacacatgcacacctacatacacatacacatgcatatacacagagatgagggagcgctgctgctccctccgtaatgcagagttttctggttctgagagacctgctggggctaattcataaagaggctgagctggggctgcagagctgggcacctagtgtgctgccatcaccaccagtctggactgtttgttttcaggtggtgtgtgtgtgtgtgtgcacatgtacgtgcgtgtattacatgttactataggtatgtgcacatgtgtatgcagatacagatacaggtgtgcatgtaaaagccagagatagacagctggggaggggggggtctttcctccatgattttgtgccttttttgagatggcggttcactgagccaaagctcattgattctgtggggctgactggacaaaactcatgtcctcatgcagacactttgctgactgagccattctgctgaccccagggctttcttccatattgttctttatcaaagacctacaaaacagtgcttggaagtctcctgtttccttctttctcttttcacaaacatggcagcaagaggaaaatgcaggagccagatcagtctcataacggggtcacagggaccctggagatgggcactgagctgtggctccctccatcctgctagaatcttaggaagagagaaacaggtcccaagccgtcagacaaaaggagctgggcggagagagaaactcttcagatcagtagccatggagggagggtgctgccaggcaccgtgctccaaacactgttgtctggatgctggttgccaaggcacagcaaggtctacagaggttggatggaagagaggggccagggagggagggatgatgaaggaggcatgtggtttcctgagataggctccaccaggcaacccattagattctccaggaaggcctccgggggtcatcctcgtccttgatgcccccaactgtccccagcacggtaggtaggcacagctcatactttcaatggcagggtatgtggctggccaatgtctacctaagccatcaccaccttttgatgctgcttggccactgtccttcctaactctgggctcaggatctttgttgtaagtccatccctggatgtgacaaggtcttctctttctcttctcttctcttctcttctcttctcttctcttctcttctcttctctcnnnnnnnnnnnnnnnnnnnnctcccctcccctcccctctcttctcttctcttctcttctcttctcttctcttctcttcttatttagtggacccacgctgtgtattatctgagctaggctgggctactactgtcaagataccaggacttttctgtgggatctaaaggaccctggaagtgaggggagcctgctgacccggagggagattcttagtggtggaagtcaggaagcttcaggagaaatgcagtgtgacccgagggagggatggctttcctccaagggcactcatctcatttgactcagctctagagctttgattctccttttgaaggggtgggcatgggagctgggggagggtgaatctggtagatttgccttgggatgtcttaagagagatatgtaaggttcctgcttaccactttctaaccaccttccagaaacatggaaaccctgactgtggtccaggttcctggttagatcctaagactgtggtcagaaatgggaagagaaacccttttatgatgaacttctaggaaggctgatggctgtggggtgaacacagactcagagcccagagctcagggcgtacttttggctacactggtctggttctctatggagcaagaagtggatcaagaatccttaggtttttgagtggtccctgtcttagcacctggatcctgctgcagcatgtcctcacagtggtttccagaccaacgccacttgagtccccgtgacagggagggcctcctctagcctctaatttcttctttacttaatatggggcagatgggggcagggcagcaggattgctctcagatatctctcctctgactagttcacactcttggagagataacctgcccagaccttcttggcctggggccatacgctgatctctgaaggctccagggaacccagtgtttttctgttttggagctagtcccatcatgagtctgagtgagcacccagacttacttttctgtgggtccacaggagcttctctcacaggcctcccacgcatgggtgtatggtccacctggtagatggggagaaaggctgagccaaggtaaatactgactctgtcaaatacaaggtaaatacaagcaggtacaaggagtacaggcccattagtaggctgcagggctggtgtcctgccaggagccattagtctgagaaatgtttgagagctaactcagaacagggcaaggcctatgacacagcctggagtgttgtctgcctggggcccgtaggctgtatcttggaggagtcacggagaagaggtcccggtgtggggcaactagggagagaaggggattcagaggcagaggagaggcaccacacagttgctgctagcacagggcaaaggaagaggactctagccccactcccggggtcctcgaggtgtggtaggcattgaagagacctctcccttcccctcacctgtcttcctcagaactcaggcatccacaggctcgatgaagcagggaagatatggagagagaaagcagaggaggggaaattagatcagggaaacaggatagtgagcagcctggggatgtgtgtgtacatgtgtgtgtgtgtgtgtgcgtgtgtgcatgaatacatatgtgtgcatgtgtttgtgaatacatatgtgtgagtgcgtgcatgcatgcatgcatgcatgcatacgtatgtgtgtgtgcttgcatccatgtgtggagggtggtggtcagagagaagcccctggggtcaggtgggagggaggctggcttctcccaactcatccatgcctagtgtgcatgccccttcactagctgtgagatttggggtcagttccttaacagtcccgtttcatttttgagagaagtcctcactctgtagcttaggctggccttagacaaactcataattctcctgcctcagccttccgagtgttgggatcatgggccgtatggtgcctaacttggttctttaacttcactaacctgttgcctcaacagtgagtcctggagtgggaatggtgacaacccctccacacttcccaagcccttcacacttcccaagccccccacaccaatctccttctttttctgtcttttttctctgttgctttgatactttgattttaaaaattattattatttttttattaattaatttatttattatatgtaagtacactgtagctgtcttcagatgcacctgaagagggcatcagatctcattacgggtggttgtgagccaccatgtggttgctgggatttgaacttcggaccttcggaagagcagccaggtgctcttacccactgagccatctcaccagccccttaaaaattattttattttattttatttttgatgctttgagatagggtttcttcacataaccctggctatcctggaacttggttagttgaccaggctggcctggaacccagagtttgcctgcctctgcctcctgatttctgggattaaaaggcatgtgccaccaccacctggctgcttttttttgtttttattaaaagaaattattttcatagaatatattctggttgtgtttttcctttctcccaacaattttcagatcacccctactccccaactccatattcttttttctcttcctctttaaaaaacaaacacataataataaaaaaaagaacccacaaacaaaacccacgaacacttaaaatcgcaaaaccacaaaaccagaaaccaaaatatgtaagcacaagaccaataagaccaaccaaaccaaaccaaaataactcttaagttaaatgggaccaaaaatggctacaaaattacccttgagtccactttatgttggccacctgctcctgggcatggggtctatctaccctgaagtgggaaagatgaacttttcctttgcaagagtgtactaaccgctgacagctctcggttagacgagggagctgtccactttcccctctcagcgcccgttcccatcaggcttggctatgcaggccctgtgtatgctgccacagttctgtgagttcctgtgtgtatcctgttgtgtctggagggtaccgtttccaaggaaacacctctggccctgacactctctccatctcctcttctgcatagtcccctgagccccaaggaaagagtttgatcctatttaggactgagtgccccgaagtctttctctctctgcacgttgactggttgcacaccatccaattgcatggccactcccttttagatggagatctttagtaccttgagaggactttcagtgtggatgccctgcaacccaagaggccagtagccaccacttgggctgcctgaagtggggccatggggtaggattagcaggcccatgttaagcccatgtcctcagtgacaggccaggcagctggttcactacttacataaacagggccaggaagctgaacttgtttttgctggcaagagcagcagtagcttcgggagaagttgagaaatatgtcattgtgtgcatacttttctctctggctattgacatttgcaagtttacatgaggagggagaggagctggggcaacaacaacagcaacagcaaagctctttggctttctggaaccagactttatcctagtggagagagccccactttccaaagttatgttttgaagtcctcagttgggggtgaggggaggaggcgtctactgtggggccagtgtcccagagagagaatgtaggccacacaggcagggaagcaaggaaggtagggaatttccctcccctagagctgtcacgggagaggaaaaacattcgtctgagggtcctggaacagcctagtcaccaactgtcccccgacccccacccagtgatcacccaatgaccatccacagatggatgatgtgtatgtttcaagttgggcattgcctgtgggaaacagaggtccctctgagaagtaatgactggggagtgatgggacactagataccaggagcaggactctcaggggcccccagaccactgtctgaactctcattgctcagagaaggcaaatgggccccatcaggggtctccacactgcctaaaactcatgggtaaggccaggtgctacatgcttacaatttcagccttttgaagcctgcggcaggaggatcactatcactctgaggccagcttagggccacatagcaagagcctgtctcaaaaatgaacaaaactaggcaagacactatagaagcctaaccctagccaaccagccagcaactaagctgtggctagattacacaccatgtgccccaaggggcaaggacacactttgagaaactggcagggagattctgcattctttcctgattttagtcccacctgaggtacttctgtcctccctgcagagtcttgttaggagcctgggacgcagtgacatgacacgttcctttctgcatgtgacatgccttggcaagggccaggaagactcacaatcctcaggtgcccgtcttcccttgtctgtgatgctctatgatgaagcaggagctgggtgtcgggagctggttcctcctcaaggtcattgcagggagaaacagaagcaggaaaagatgtggccgtcgtcatcgaggctggtacgggaggcagactggagcctggtctgcacataccgtagcaggggcctcctctgtcagcagagccagtgctgatccatcctcttggagggtctcatacaccgcctcttccctgtggggctcccttcctttcttgctgtgtaaggagacttcagaccccagccgtcccccaggtggctcccttctgaattccttaaatgtactgtgccccttttatgaactggttctgggcaatctgcttatcaaactcccagtggtttctcaaggccttctaaagtttctctttgccctctagaacgatttatttctcctctctgttctcagcatcaggaatatattttatttccaaatagccaggattgtgagtagttttaaggcccccaggaatctggagattggacaagatagcagtatggaagagtggggagaacacagccacagcgtggagcagatgtgcagtggctgctaataccctctcctggcggagacgtgtggcctcgtgtgcaacactgcatggaaaatgttgaatccttcaggaggggacaggtttaagcttgctgcctgactgtcacaggctgaacagttgctcaagggcagatgttgtgtgctctttgctgaatctcatcctgtgtagcagctgccacacctcacgctgccttcagggtatgggagggatcctatggtcactgggcctgtctcacaggaagagtgttcccggagtacaagcccacctgattccctgctgtgcctcctccagtggggtctactgaggcgaagtcctggccaccttcaaaagtgcgagacatccagaaaatggaggctgagcccaaagatggttctttttgtcccttccnnnnnnnnnnnnnnnnnnnnnnnnnnnnnnnnnnnnnnnnnnnnnnnnnnnnnnnnnnnnnnnnnnnnnnnnnnnnnnnnnnnnnnnnnnnnnnnnnnnnnnnnnnnnnnnnnnnnnnnnnnnnnnnnnnnnnnnnnnnnncccacccccttcaccccaccccatgtaatacctgggatccgtatgtctttgtttaaagaaaaaaatatatgagcaagattagactctttaaagcctgagaaagccaaattggtgttgtgcctattgtcccactcctactgaaggagtagggtgggtctctttagccaggggttcagagccagcttggggaaatgtagttacacctttgtctcagaagacaaagcaaacgtgcaaagctctatggaagagcaaagcaagagaaaggagaccttggtatcccatcctctgcctgggcagacagaggttcagggagggtgcttctgagactttcacattcgctgttcaaaagctgctactgaggctatctgaccactatgcaggagctaagggctgactcagagctgagtcaggaggccgagcagtgggtgggtgggaggtcaggctgtccctttggactggcaccgagctcttttgtcctggcctccccagtgagaacgtccttttgatctttaggcacaccaggtttctgagatcaaagttaaatacagtgggtttttttttttttccacagtctcagaagaaatatgtttttgaagcagggctgacgggcaccatttgcagatgggtttttataattaattgtcccggatttaaaaaagacagaaggaaagaaagaaacgggtgactcagttttaaagattcagaagaccatcagtcaagttccgcggcaggggaagtaaccattgtctgctctttatggctctgcttttgtgggaaggaaaagaaagattgtttgtggggaggggtcggtatttctcccaattacctgaataaatttgtcattgttctcaagggtagtaactgaacagtcctggccaatatgcaagttagtcaccaaccatgcaaaggtttctattgggagggaaagggatagggaagtggccagaggaatatttttcatggaactgacaagggcaggagcagaagagaactctgcagtgtcccctagctggaccccagtgcagggtctgcccactcggcttcatggaggactctgcttggaccaccggtggttctgggtgaggtgtggaggccttgtcgtatttcaaacaagcatggaatgagtgccgttgtgttccctggtacgaggcaagcaggaccttacggtcttacggtcatggctgcgtggtgacctgtgtaggcagttatgcatcgcttcataatggggacgtgctctaagaaatgtgctgtctgatggttttgttgatgtgcagatagagtagttacccaatccttgatattttggtcagtgacttgatgtggtctctatcacgaggtgaggcaagcagatgtaccacttgccagcataatgtggcatactcttttatagcaaaattttattattctatttaaaattgtgtgtgtgggcatgtgcacacatgcatctggaggctagcaattggcctagggcgtgttccttagtcactctccaccctatttgtttatttttcagttaaaacaaaatcagatctaaagccaggcagcagtgggacatgccttaatcctggcactcaggagcagaggcagaggcagaagcaggggcacaggcagggggatatcccagttcagagccagcctgtctagggggaaagtcacatctgtttatctaatgtggatacacatacaccatgacatgaacatgaaggtaggaggagttggttctcgcctcctaccatgtggagtctgggggccaaacgcaggttctcaggcttgtcagtaagtgcttccccagctgaggcatcccactggcttctgccacctcactgtgacagtgtctcactgaatctggagtgtgccaatccagctaggccagctgggcagcaagccccagggattctcttgtctccagctctctagctcagggatgacgggcgcttgctgctgtgcctgggtgtcacgtggggcttgggaatcaaactcgggtccttacactcagtgtgtcgaaccattttcccagctgtatttaaaaaaattcgtgtgtgtatatgtgtgtacatgtgtgtgtgagcatgttcatgtgtgtgtgtgcacatgtatgtgtatgagcatgcttgtgtgtgtgtgagcaatgcacacagatgcacacgcatgtagaggttagaggacaaatcttgaggagtcagttcagtcttgccattttggatccagggatcacactcaggttgtcaggcctttgtgcaatcgtctctacaaactgagtcctcccactggcctgatgtttttggtttattgagacagaatctcagttagcccaggatggcaaaagcccatgattttgaactcctgatcctcttgcctccatctccaaagtgcttggattatggcatttggtatttaaatgagaaggaccccaataggctcatgggtttgagttcttagtcttcaactagtggaactgtttgggaaggattaggcctctctctctctctctctctctctctctctctctctctctctctctctcacacacacacacacacacacacatacacacacacatactcctaaggtgtgatcttgttggaggaggtgtgtctctagaggtgggctttgaggtttcaaaagtccacatctctctctctctccccacttcctccttcctttcctccctcctcccttcttctttcccccttcctaagatgtaaagttctcaactactgctccagtgccatgcctgtctgctttatgatatgataatactgggttactctcatgacagcaaataaaatagtatctaagacaaaaatatagcagtaggcctggctaaaaaagaaaataggaatacatagtttaaaaagaaaaaggaatacattctaaagtaagcacacttataaccctatcattcagccacacctggtccctatgctatacctctatctgactcagtaaggtggtccacaccagcggtcctgcagacatatgcatgctgtggagtgacctcacggtggccatatcactggtcatgaactgcactagaattactgcagttctaattttatggagccttactctgtaggtggcctgtggttgacaaaaacatcttgtacccatgactagttcaggacagtggcctgagcaaatgccaaagaaagtatgagatgtccatggttgctgggctttcatccgccatgcactggtgctcccaggctgcactggtggtgccccagggctgccctgtgaattctgatagtcgctcttcagctgcagagtgctgctgccaacattgcaacagagccacctgccagtagagactctctttggacagcatttctttctttctttctcccttttttttttattaagatttatttatttattacatgtaagtaacactgtagctgtcttcagacactccagaagagggagtcagatcttgttacagatggttgtgagccaccatgtggttgtgggatttgaactccggacctttggaagagcagtcgggtgctcttactcactgagccatctcaccagccccatctttctttctttttaaaaaagatttatttatctaatgtatgtgagcatcctgtcactgacacaccagaagagggcatcgaatccaattacagatggttgtgagccaccatgtggtatctgggaattgaactcatgacctctggaagagcagacagtgtttttaaccactgagccatctctcccgcccctttggtcaatctaagctcatatatgttcaaaatatagacatgagcttgatgcttgtgttaggttttttcgttacagctgctttgtccagtggaaataggagagtaaggatattgatacattaaacaggagggccattggacctgctaaactttacctcattcaggccaggcacacacctgtgcaggcacacacctgtgcaggcacacacctgtgcaggcacacacctgtgcaggcacacacctgggcaggcacacacctgggcaggcacacacctgtaacccagcattcaggaggcacagacacaagtatcaaggtcctcctcagttatatagtttgagaccagcctgggctacaggagaccctgaggtatgcttacagcttcagaggttaagtccatgatcatcgtagagagaatcgtggtgataggccagcacggtgctggagcagcagcagagagctgaacatcctcatctggagacagcaagcagggagccgaggggaggaggggaaggatggtttctccatcaaggccacacctccagcaagaccacacccacagaaggccacaccccctccagcaaggccacctctcctgatcctttccaagcagtcccactaactggggaccaaacattcaaacacttgagcctgtggagctgttctcattcaaacaccacagcactggaaacaaagtcgaaacctcagataatggaatactaaactgaggtgacacccacacccacacactgtggaaacaggactggaaactgcacagcacaggagaatacatatgaagctcagagaccaaagggaacaaaagaccaaggggcccaggggtaaccaactgactctttaaagtagggaagaaaggaagaaggctagcaagatggctcagtgggtagagatgcttgctgtactggttagttttgtgtcaacttgacacagctggagttatcacggagaaaggattttcagttgaggaaatgcctccatgcctccaactgtaaggcattttctcaattagtgatcaaaggggaaaggccccttgtgggtgggaccatctcggggctggtagtcttgggttctataagagagcaggctgagcaagccaggggaagcaagccagtaaagagcatccctccatggcctctgtatcagctcctgcttcctgacctgcttgagttccagtcctgacttccttggtgatgaacagcagtatggaattgtaaactgaataagccctttcctccccaacttgcttcttggtcatgacgtttgtgcaggaatagagaccctgactgagacagcctggtaacctgaagtcaacccccaggtcctacatgactgaagggaagaattcccacatgttgtcttcttctgtcttccacatgtgccatggcaagtacaaccccatgatagatagatagatagataggcaggcagacagacagacagacagacagataatgtaataaaagttttaaaggaggataagctgccaaatgtaaagtacatatagaacaggaagttgtagctctgggaccagagacaccttcagagataacaattgccccagtttcaagggaatctcctggatgttttatgcttcataatttttatgagtattgcatatattaatttgcatatgttcaacaatgtgtaaaatagttacagaacaatgaaatactaaaaggatgtcattgaagaatgtgtacaatgcttgctagaaacaaggccttttgggactcttgggagagggcttcaaagagtcctctcagcaccatctgaggtttgggcttctcaggctctggagttgtccctcaggctattgctgtgagcactgtgtgacatctgctccagaggctgcatttctcacaggtggggctctctggagcccaaacctgtccctccctcatgctggagccttgggtgctgattggaagggggagggccttccttactcactgtgggtcagagaagtctaggaagcctcctcaatctcacctagttacaaggtaacatgctatttttatcttattttattttattttattttattttattttattttattttatcttattgagacaaggtctgactttgaagccctgactgttctagaacttacagagactctattaagattattaagtgtgacttcttgtcctggtctgaggctaagatcttcccttcccttcccttcccttccnnnnnnnnnnnnnnnnnnnncctctccctccccctctccctccccctcttcctcctctctctctcttttggatttttcaagacagggtttctctgtgtagctcaggctggcctggaactcagagataccctgtctctgctttccaaatgcagggatatggctggggctaacggctcttttcttttctttttttcttttcttcgctggttcttttcttttcttttcttttcttttcttttcttttcttttcttttcttttcttttcttttcttttcttttcttttcttttctcttctcttctcatctcttctcttctcttctcttctttttttttatggcaaggtctcacaatgtagctctgactgatccaaacttgctatgtagaccaagttgacctcagccttgaactctcaaagatctgttcacctctgtctcccaaatgggaggcattaaaggcgagcaccacctcacctgtctcttcacagggttttctatcaagggagctcggttgctggatcatggcgtgagaggatgtactgtaggagacagttctgtggtctgggaggtttctggaggccagacagatgtggtgtaggctagaccgtgggaggactccacagtcactgtgttactgtgaaggccttggacttctccaagtcatcacaaagtcccattttccagttgccaaggcttactttgtgtttttcttccccagaggtggcaaatggcacagtgacaagcctgccaggggccaccgttaccctgatttgccccgggaaggaagcagcaggcaatgttaccattcactgggtgtactctggctcacaaaacagagaatggactaccacaggaaacacactggttctgagggacgtgcagctcagcgacactggggactatttatgctccctgaatgatcacctggtggggactgtgcccttgctggtggatggtgagttgtgctgtcagtgtccttggaagtggctccgagggtagcttcaatgtcctctgcattccagaaagatcctctggctgatcttttaactttgtcatttttggctcaaaagtttcaggaaaagggacaccgctcggcctgtgcgtgtggccagccagctgtggaagccatctggcagatttaatagccctggactcccagccaggcacctcagcttagcggctgctaaccccctcagattcttttggcaaaataaagtgaactttattactaagtttccatgttgcaaagtgttacaaagagaaagtaagtgctgaaaactgcccagcacccctgaaacacacatgagactctcagagggagcatctcaccaaggattggcagggtaagggctccctggctccagtggaagccctgctctcagccacgttcttccttatgtcccgtgtagtccttccagtgtccgtttgtccagtgttaacatcaggagaggccacaggtgctccttttgcatctttgtcttttcaaccctttagagcagtggttctcagccttcctaacgctgcggccctttaatacagttcctcatgttgtagtgacctccaaccataaaattattttcattattacttcataactgtaacttcgttactgttatgtaaatgtaatgtaaatgtttttttgggagagaaaggtttgccaaagggatctcgacccacaggttgagaaccactgctgtagtcagccctttctctctgtgcctgggactccttggccagtatgtccctagggagtcctgtcatttgtggctctgagctgaaccaggtagtcccctcagctgcgggtgggggtggaggtaatgatgcacagagcaggtctgcttggaggccttgcaccccctcatcctgctgagtctcttgcagttcccccagaggagcccaagctctcctgcttccggaagaacccccttgtcaacgccatctgtgagtggcgtccgagcagcaccccctctccaaccacgaaggctgtgctgtttgcaaagaaaatgtaagtgtcaggtggggctgtgcactgagtctagttgatgcttgctgatgtcctagagccaagggaagcagggtggaaccctccaggcagctgttggactgagtggacagggaccttttaatttttctagatttattttatgtgcatgaatgttttgcctgtagcatgtgtgtgcaccatatgcacgcctattgaatctcatggaactgaggttagaggtggttgtgagccaccatgggggtactagcagtcgattccaggaccctctgtaagagcaacaagtgcctttaactactgagacatctcttcagtcccaggaccgatgttttatcagtagaaagtttttccaagtctgtcatataacatgtgtaaggccatgctttgattctcagttatttcaaaaattaaaaaaaaaaagaaagaaagaaaaagaaaaaaatccttaggaataaaggaactgggccctagggtcaattcaacttacctttcccgacagctgtgggaaatgcacgctgaagttcagtgagactgattaactcgcttgaggtcatctagctaggaagtggttctaagtgttgggaagagaacccaagcccattttccatcaaagtccaaaggttttgggtgttgtcctacaggaaagggacaaatggctctgggggcttggaatgaggctgataggcttctatcggtaccttggccctgtgagcatgataaagacaggatacagagagtggtcatgggtgggggggtgaggtgcgacccatccagacttttgcctgttagaagatggcatggagacctggggccagggaggaagaagaagtataatgtagcacgctagagaaattgtagtctccacccacaagccacgcctctcacgcctagatattcccaataaagtttgagtggtcagagtgtggtattccttcttatggatccttcttattgggtcctggtagttactaccgatcaaacatggccccagaatattaagtggaaattcccagaagtaaacaaaagcatgatttaaattgggtcattctaagtaaccccacccaggttgtgaatcagctccagctacctgtgctgttccacagaactcctgatcatctgcttgccagtatttgtgttcatcaagcctggccctaggacaagatcagacagtgatcaagagcacaaaacatgagagccagaggttcacctgggagcctggcagtactgcagggcattgggaaggcatggtgtaccagggtaggccctgctaccatgaagtctcaggtctctcaccgaagggtcttggaaatacccctagcagatgagggagaatttccacattacaaaaccagtgtggcgaccagcgcggtctgagcctgaggttcttatctgagtctgaggttgctcgcttgttttctagtggcagggaaagtggaagtgggtgagatctcaggtttccgggtccactggggtggtttctgacttcccttggccatcttcagtctttgagttcttttctattttccccatccctcctgttcctctttatatgtgtgctttggtgatttgccagcatttctgctatatcacctgagggcaggtcttttgtgccctgggacagggaagggcttttcctattcatttctgtgtgtatcctttatagttcgaaggacaagacccaggaagggaataagaccagagggaccttctcctccgcctgtccctcattggctgggctctgccaaagatcctatcagacgggcactaatgcctttagctttactattttctagggagaaaataaacacttgggttgaaaagcgtgctgaaagtcacagacactaaataggagcagacactggctgagttgaagcctgaaagctagaatcagttctcaagcttccaattcctgacttctttctcttgaaaaagaaacaaaaaaaatgctagaacctttgtgcccttctctgttgtgtcccacagcaacaccaccaacgggaagagtgacttccaggtgccctgtcagtattctcagcagctgaaaagcttctcctgccaggtggagatcctggagggtgacaaagtataccacatagtgtcactgtgcgttgcaaacagtgtgggaagcaagtccagccacaacgaagcgtttcacagcttaaaaatgggtaagggagctcccgctgcagctacttccttcacttcctgatccatccctgggcaaggcagggaggatgtgcagaggggcttgggagctgggtcttctgggggcattgctgataaatagatgaggagagcgggggttcttcctgtgagtttttgcttagcaggtgcaaggctctgaggtctgtttacactaaataaataaaattttaccatttctggggagtggtacatgcctaacagtggggatgtctgcggagcctttgagggtctcctctgtgcttgctcctgcatagaagccctattccctctccacagtgcagccggatccacctgccaaccttgtggtatcagccatacctggaaggccgcgctggctcaaagtcagctggcagcaccctgagacctgggacccgagttactacttgctgcagttccagcttcgataccgacctgtatggtcaaaggagttcacggtgttgctggtaattcatttcctttgtttggagaaaatgtttcaccctgtcgtagcctctacctcatgacaatccatcttccttagcctcctaagttcccaagtgctgtaactaaatagtgagcccccatgcccagctgatctagatcgaagcaggaaaatgcccctaggactgaggggacgtggaaaagaagtaaagtaggttctggtccagctttggcccctccccccatccttcatagtctccggcgagccatttaacttgatgagtggtggctctgtctttataaaataagactaacaatgccaggccagactcctgattggcctaagaagaatgctgggttctgtcacctacagtgacttcagaatgcttgagaaggactccacctcagcccctggggtgggtgagcctctgccaagcggagagcggggtggtcaagagtgccctctccctgtagcattgcctcacagaggccactgagactcaccatgtctccatcctcagctcccggtggcccagtaccaatgcgtcatccatgatgccttgcgaggagtgaagcacgtggtccaggtccgtgggaaggaggagcttgaccttggccagtggagcgaatggtccccagaggtcacgggcactccttggataggtacctgggtctatgtggagggaggatgggacagctttcagcttgtgagtctatcagccgtcttgcactgcatggcaaagcaggctaaatcagtcagtgtgcgctcttcatttcagttcattgagaaagggcttcattcagtccgggcggccttggaacttactttgtagtcaacatgaccttgaacttctggttctcctgcctccatctcccaagtactgggtcattctgtgtgccacagtacctagctctatttgcccaggtctggtagctcctgtgtgtgtgtgtgtgtgtagggtcaaggtgctggctgcccatgtgtttgatggtggagctcactgggtttctccttacccactacacgtcttctgtccttctagtaggtgagcctcgggtgagggcagtagggagggggtaaggacagaaggatgggaggagctccaaaggatgataggcatggttaattgactaaggctatttatcttcggaaatcaaccaataataatgctgtgagggacataatgaaatctcccaaagcatgagcatggtcacctttcactgctatgaccctgtctcgaaaaacaaaaaggatgaagcccacaacatgtgagtgttgagtgtattttaatccaaacctaaacgacatnnnnnnnnnnnnnnnnnnnnnnnnnnnnnnnnnnnnnnnnnnnnnnnnnnnnnnnnnnnnnnnnnnntatacagtatggacacacacacacacacacacacacacacacacacacacacacacacacacacacacatggtttttgttagagtcctagccccaactgtttcctttgctgcactatggaactcaaagttttatatatgataaagtattctaccactgatctatatccttggcctggtccagaaacagcttcttcaaaagtttcttttgtctaagtgtggtggtggcaaaggcactctgtgagttcaaggacagcctgatctacatagttagatcctttttcaaaacaaacaactacaacaaaaacccaaagttggtttgtttgttttttattgtggtacagtgtgcatggcgtaaaatttacttttaaaactcttttgcaggaggtttttgagaagggcctcattatgttttctgcccttgaactctggtttttacatggccttctttttttttttttaaagatttatttattatatgtaagttacactgtagctatcttcagacactccaggagatagtgtcagatcttgttaccgatggttgtgagccaccatgtggttgctgggatttgaactcaggacctttggaagagcagtcggtgctcttaaccactgagccatctctccagccccctttacatggccttctgattataggtgtgagccaccatgccttgttattataactgtttttgtttgttttgtgtttggaggccagaggtcaacctgccgtgctgtttcttgtatactctacccatcaggttttgctataagcattcccagtggcctggtgcttgctgagtgggctgggttggcggggcagagagcttctgggatgctcctggcccacctccctaactgtctgccccagtgctgagatcacacagccagcctccctcccatgcctgttctgttttttctaacatgagttctgaggcattgcacgtacacggccagccctgttttaatcgttgttcagtgcgttcgtcgtgcagcccatcactgtccaccatccatctccacatcatttgcatcttgcagaactggaatccctccaccttgaacagttacctcccatccccgtcccttccctagcttctgggacgtccatcctactttctgtttctgagtttgaccaccttaaacacttcgagtaagtgggttgtacggaaaccttttgtgtctgacttatctcacttagcacagtgccttcaaggtcaattcaaactgtggtgtgagctagaatttccttcctgttggaggctggggagtgtcccattgtacacaaacatcatgctgcatttccccaaatttgactgtggagcttgggctgcctctgccttttagtgtgtggctgataagagatagggtgttactgtttctggcctagaatgcacagtgtagaccaggctggtctcaaactcatggagatccacttgcttctgttccccaagtgctgggattataaaggttccacttttccttcaacttatcaaaactggcattctgtctgtctgtctgtctgtctgtctgtttctccttcccacttcccacgtgtgtgtgtgcacgtgcttgcatcaggagttggaagccatgcacataatacagttattttatacttcaagaaaacctttataactctctgtcatagtccctcagaggggacctcgggcaggaggaggcacttggtctagaagcccactgcctcagtttccctgctttaggaaacaaattgacatgggaaagtgggggagggaagtccacgcccacacccccctggtagctgtggccttcttgccttgctcctcgtttctttggaggtcagcttcagctctgactccttttacaagtgaacaggttggggtgtctgacgacatctcctctcctgctggggcttcggcaggaggtcacagtaactatcaggactggggatgctccagcaagcagagtcctcacagtctggactctgccagctacagatgatttgattctctccatagaaccctcatggggcttttgcgggttcaagggttctgggttgcagtctctgctcagtccagctctctccttagtgcacctcctccactctcctccccctgttccttttctgcactcttctcaaatcttccattccctgtgccttcacctgcagctggcacacagtgcttatttggtgtcgaatggacggtcatgggtccgatagctggctctgtcccttgttactatgactttggggaagtacctatctcagccccagtttggttatttgtcacttaggagtactaacacctgcctaaaaaaaaaaaacaaaaacccaaactcagcacctgcctcccggagccttgggcttcagtgacttggaaagtggcatttatagagcaggctgtgagctggctgtcacccaggactctactcctcctgcttccaacctccctagtgctaggattataggagtgtcccccagcccggtgccaccctgcccaatttatacagtgctgaggaccaaactgagctacacccttagatccaaagccggtattttaaagcttttaaaactgttcactgttggagccagacaaacttggtttacgccactttgggagctaaggggatgctttcctggggagagacagaagactgtcagggcttgctgtctgccagcctcggtccaggttcagggagagggaagtagacagtgatggagcagggcacttggtgttttctggcacgggacacatttgcgtgggcacacacataagtatgcacacactcacacacatacacatgggggaaataaacatgcaaagttatagctttgccactttctattaactttgagaaagttattttcctttttcttgcctcagtttcccccatctttacatgttttaaagatgtacttgttttcagtatgtggtgtgcatgtgagtgaggtgtgggggtcagaggagaccttccagacaaggattctctccttccccagaagctggggggggggggggagaccttccagacaaggattctctccttccccagaagctgggggggggggggtttctgaacttgtgtgaggcatcttgctggcaccccccatattgatttatttaagttttatttgatgtgtatgggtgttttgcctgcgtgtatgtcagtatgccacatgtgtgcctggtacccatggaggtagaaaatgcactgggtcccctggaactggagttacagaggatttggggctgctgcgaactaaacctaggttccatccaagggcggcgagtgctcttatctgctgagccatctctccagccccactccccatcttctttaaagtgaagattccagtcaaacacttgactggaatggttcacatctgtaatcaagcacttgagaggctacaacaggaggattgctgtgagttccagattggcctccacttcagaatgagaccctgcctcaaagatcaaaacagcaatgacaaaaacactgggcattgtgtcctgtgctggtaatcccagcacctgggtgacaaaggtgggagagttaacctaaattcggggtcagcctgaattatatagtgagttccagggcagttgagagactaaaattatgtgagactaaaattatgtgagactttgtttcaaaaccaaacaacatcaaccaaaaacaaaacaaaacaaaacaaaacaaaacaaaacaaataccctttcaccacacagaacctgtggggagcctggcatggtgttttacacttgtaatcccggtatttaagaaaattgaatttactgggtagtggtggcacacacctttaattccagcactcaggagacagagtcagatggattctgtgatttcaaggccagcctggtctatagaggacatccagggtacacagagaaaccctttctcaccccctttcccaacaaataaaaaattaaaaaaaaaattgaattcaagatcaaaggtcaggctggtctacatagtaagttccaagccatctaggctatagagaggccttgtcttccaaagccagtccatccattcacacatgtacacagtcctagtgggactcaatgaggcttgctgccagggttctgagacctgtagggcaataaaaaggtttttaaggacttgaaaaaggttccatgtgatgttgaacttgtctgggtctggggaacctctgggccgaatggccatcagttcttggacctatttttctctttactgctgcagtcatttcctggttttagctttgaatctagcagcagccaaccacatgctctgttgtcctgtgtacacccttctgtacacacccttctgtgtacacccttctgtacacacccttctgtgtacaaccttctgtacacacccttctgtgggttgaactcagctcattatgctaagttgggaggagcacaaaggtaggaggtgctgggtcctagccacaattagaagttcaagtctgagttaatttgctttgtgaacttagacaaattacttcccctctctgggccttctttcaacatctccagggttgctgtgtgcttgtctctccttctggaggtggtggagcccattggaaattctctcccaatcagtaacaggtcaccctgtcctctgccccttagtgatatgttattctccagagttggggacactgaaagtcttatacttggtggtatttttaacttcttagtggaaaaaacgctgagatgacgagagattctgagtcattccatcccttgcctggcaaggttcagagctggtccctcaggccccattctgggcctgccctcaagtttgatttctgtggaaggcagttcccatgaagggagtggctgtccccgactcctttttatcagggtgtctggctgatcccaggcacgagtcacttcatatattttattgcaaaaaggcaaactcaaggaattactgttcagagtgcccctatcttgcaatgtgtatcaccctggcctttccctttctgtgtgtatatatatatatatattgcaatatataacatatgataatataaacgagttttagaaactttggatcaaacatgtcttttttaaaatatgttatagtatatcttcaaagtttttccttttttttttttttttttttttgagacagggtttctctgtgtagccctggttgtcctagaactcattttgtagaccaggctggcctcgaactcagaaatccgcctgcctctgcctccagagtgctgggattaaaggcatgtgccaccatgcccggctccaaagtttttctaaagtccatattttgaagtatttatttattattttaaaaagatttatctcatcttttttcattgatttttttttttcatttttattgtatgtctctgggtgtcctgcttacacctatggccgtgtgccatgtccatgcagtgcctgcagaggctggtcggatggactgaggaggcatgggagttgcagagggttgggagccaccatgtggttgctgagaatcaaacctgggtcttctggaaaagcagccagtgttcgtaaccacttaaaacttgaagttttacttttttggtttttgttttgtttccaagacaccatctccttgtgtagctctggctggcttgggatgctctaggaagaccaggctgacttctatttcccaagttctgggcttaaaggtgcgctccctgaacttgtatttttagtagatacagaataatcaggcatagttgtgggaacatgtaatgttttgatacacatcatgcaatgtgaaacagttttgttttgttttttttccaggccactgtgtaatatggctttatcataatcgacatagctagtcccctaatgttggagagttctgggttcttagcattctgcttaaaaaatatattatggattttattgaaaaaagaattttttttttgagacaggatctcctctgtaccagccttaaactggaggcactcctccttctgggcttcctgagtgttagttagtgttacaggtggcaccattccctgcgcactgtgatgctctgggttgctctgactgggttccagggtccatgagtcactaacccttccttctaccagcagagcccaggaccaccccggcaggaatcctctggaaccccacacaggtgagcttgcccccagaaagggccagggcatgcactgccccaagtctggtttcagtgccagctgggtcttccagagatgtggccgtcaagtgccatctgcctggccctggtggctactgtttcatcccgaggtctttggataccactgacagcttagtctgagaccagattcaatttatcttagccctcccctgtggcagcctggtatcatgaagcattgggaagtggattatggctgaagctgcttaacaaattcctttactaatccaatttcccacctctctcctgagtggtccttaattccctcaacaagaagttcgagtctttgttctctgctcccaaaacacaaagaaggaagcaggggtctgggcctcacacacagggctgccagggctgtcctagaagggatgtcctcagggggctgtccttgtggggctatctggtgtcttcataggcaaaggcagatgagtccttgcctctctctcaggcggagttccaggtaggtcctaggggaactgacacgagctgagactggccacccattccactgtgtgggtgaaatctctcagatctagaagcagacggtaagtccacctggactcagaaatctgcccacaccacagctggctagggcgaagtgcaggtggggtgctaggaccggctcttcctgggaggctaccaccgtgcctggcaacagacctcatggacagtggctgtgtttaccgagcacatcctgtgtgtctttggcagagacatgggtggaaagaactccacctggcacaggggaagtgagcacacaaataacaccagtgacaggtggtcgatgaaggtcgggcacagagaggttcattcaggacacagaaaggaggtggtggctttgtggaagatgtgtagaagtccctatgaaggctgatggtgagggtcatctctcctaggtctctgttgaagactctgccaaccacgaggatcagtacgaaagttctacagaagcaacgagtgtcctcggtaagcgctagtgtcttgctattcctctggcctgcagaaaagctctcacttggacacttagcagctgatcagaggcaacgatcttccgttgttttatataagtctttgcagtactggggactaaacctaggtcttcatgctaggtgaacctgccacgggtgagctacagcaccagcttgcctgtcattactccatatgctcacttgccgttgtttgctacgatacggtgaggcccgtgcgaagagtggcacagatcaggaggcttatgtggtcagtccacagtatggctgagtagactatgagcgtcattgctggagaccgaaacagagcatccgtggaaggaaacctgtttgcatagctgcactggctcagccaagagcgagtggcctctctttagggactaggcaagaaaggggcttaggaaaggtagacagaacactctggccaggaagggagatctgtggggagtcctgcaggaggagggacatggcatgtctgtggcttgactgccaagttgggaataggccagagatgacatcccagtggagaaattgcttccaaatacttattgaaagctcccgagtctccctgactcggtcccagtgaccaccacagagtcctaggatcctccatctctcatgtgccttctgcctggagcctgggtaaaggataccgggaaagctactctgagcgtgaacggccctttggttggctgcagtgggcatcagccccatatgagctctcgaatggtgcagtctccctcagtcactgtgggaggagtcggtgcagtgcctcttcagagttctgctgccatcccgagctgctcagtttctagtaactgctgcctgactttcttttccctctttccttccttttgtcctgtccccttcccccgtcccttccttttttctatcattcccttcccctgcccacagccccagtgcaagaatcctcgtccatgtccctgcccacattcctggtagctggaggaagcttggcgtttgggttgcttctctgtgtcttcatcatcctgaggtgagacgggtcctgtactgtattgtactgtactgcactggctctgggctgtactcttgcgtcttagctttcatcagaacctaaggaactttgctcattcatttcttcattcaacaaatgaacatgtaacatgctgagtcctgggtcaggtgctgcgggaggccaggggacaggatgggtactgtgtagtgaggaagccaggccctgacaaggaagtgctgacatgggcagagctacagtagcacagccatggggaggaggaggaggaggaggagaggagagggnnnnnnnnnnnnnnnnnnnnnnnnnnnnnnnnnnnnnnnnnnnnnnnnnnnnnnnnnnnnnnnnnnnnnnnnnnnnnnnnnnnnnnnnnnnnnnnnnnnnnnnnnnnnnnnnnnnnnnnnnnnnnnnnnnnnnnnnnnnnnnnnnnnnnnnnnnggcagagacttctagctcctgaggccctcacatcagccctgagctggcctgacaagaaacactgagaaccgcatcaggctgtgctcagctcagggctgttcttgttctgatcctcattttcagtgctggagttcgaacccagggctaggcaggagctctggctttgagctatgtccctggcaccaaattatgattttcctgtgaaggaatgaaggaggaaacgaaagctgaaagaggcagtgtgggtacacccagtaaggagcacagggcacaaagcctgcttattggatggggccttaaggctcatgcagtcaaattctttaaccaaccaataaggaagcggccccaagggttgtccaaggagccagggctgcatgacactagcctatggaccacgtctacataggctgaggtaacccagttggccccacgaagcacttatatgtgctaatagagaagcatagagaccagtttgcttgcctgtttcttaggctcagacactggctgctggcagcccctgtagccccggagccactggctggggacggacgtgccggtgctaagaacacactagcaattcatttcctacctgctgagtttctactttgttccatataaggcagatttattagtaaaagaggccagtttgtttgttttagtttagtttttttttcttttctttttttctttttttttgagagagagcgaagcccaggctggtctcaaactctttatccccctgtctccacttcccaagtgttgggattataggcaggtgacacttgcctaataaaactagtaatttcaagtcaggtctggtggcacatgcctttgatcccagtgctcagaaagcagagacaggcagatctctgagttcaaggccagtctggtttacaaagtgagttccaggacatccagggctacacagagaaaccctgtctcgaaaaaccaacccctcctcccctccaacaaaataaaacaaaacaacctagtaatttcaaataatgaaaacatcctctatcttttaagactccttagcaagaaaagactctcacttagagtcagggagttaaaagccggctgagccacagcgactgggttgcacgtgtgggaggcgtttgacgttttgccagtcaggatagcatagttttagaacatttagtttatatcccgagctaaatagttttctaaatatttctctagcaacgttagagaaaatgaaaacaactaaaatatactaccatcaaaagtttgcccttccttagcaggaggtcacaactgcagggatcagttctcccaggactgagaaaacgggcttctgctaacagttatttttctgctcattttcctggaatggacttaaaccattagctgtacacctacagcttaaaacccatccataaaaaccaagcgtagtggcacatgacaacagtcctagccctgggaaggctgaggcaggaggatctctgtggattccagttgagggtgatctgcatagtgagttttagggggacacctaatgaggggccacctgacccaaacaaacagaggaaaataacccaacaaaccaaacacaaacaacgtcattttggactagttacaaagtcccattccgatatttcttaaattgctgctgggtgggatagaatcccagcctagaatcccaggccacggcagcagggacactgtggttaaggccggcgggagctacagagtgagacccagtcccccaaataagttagttaatggttttgtgttgggctgtattggtagccatccaggggagcatgctgtccacagactgcagattaggcgcatctatcggccacgtccaggcctctggtcctgctcgtctgtgcccatgctaggtataagcatcttcaactggtttagtgatctcagaaagaatgtttcaaaaggaaagcacggttctctagtttatcctttgtctcacttactgttctctcactgcgagaaaacacccatgatcggaacaacttatgaaaggaagaatttaactgagggcttgcttccagtttcagaagtttagtctatgatgttgggaagcctgggcagccggtaggtatggtgctagagctggagctagaggtggagctgagagctcccatctgatctgcagagagatgggggtggggtggaggggctgaatatagtgagggtttttgaacccttctacacctcctccagcaaggccacaccttctaatcttactgtacggttgcactaactggggagcaagcattcaaacacatgatccagtgggggccatcctcattcaaaccaccacagtccttccagttacagagatggtttccatagtgtgtttatgagatcagtaacagttgtgctttattacaggcagtttgctaagtgtctagagcttaatgaatgttaggcaagtgctctaccactgagctctctctccagcccctctgcactcgcgcgcgtgcgtgcgtgcgtgcgtgcgtgcgtgtgtgtgtgtgtgtgtgtgtgtgtgtgtgtgtgtgtgtgtgtgtctttacgattacttgccacaattgttctgtatatataactctaaattctgggctggaaagatggctcagcagttaagaacacttactctctttgcgtaggctctgagctggttctcagcacctacactgggtggcttacaccacctgtaactctagcaccggggatccaataccttgttctagcgtgtatttacaagcacatacccacacacaggcacacatacctatgattaaaaataataacaataataaaaaccctcaaatcctaccttttaaaaatattttcactttgtaaatattttcacattctttataaacttcacatttattagcaataggcttctcttataagtacagattcccaggttaactgttatcaggcactggaagatgttttgtttttacaaaacagcactgtgctggacatctttgtgtctaaagttcttccatgtttatatcattgtcttagtcactattctattgccatgaagacaccatgaccaccacctttaattggaggcggggagcatggcagcagacatggcaggcatggagaagaggctgagagctacattctcatccttaggcagagacagagagaaacagtgggactggcatgggcttttaaaacctcaagtcccaccccctcagtgacacacttcctccaacaaggccacacctctaaatccttctaatcctttcaaatagaaccattccctggtgactaagcattcaaatctatgagtctatgggggccattcttattcagaccaccacagtcatttctagggtctgttcccagaacatgagttcctgggtctgaatgcttttcagtccacggtgtagcagcctgccctcaatcctcttacagggagaattccactcagtgactgagcgcactccccttcgcaataactgggctgtcttcctgcagccaaataacattccgcagattgtttacgttgcttggataacaggccaagagccaacggcagatccagagccagctatcaatcatttatcataacaagaacaaggaatagtctgctggtttcaagccccaaaaatgcccaactcttgtttatgacattggctttccctcccccaccctagcacttccttaggtaatggcagctgatgggattagggggggagggtcaccttattctcactttggaatcagtacatagcaagtcagccatagagaaggaagtcaaagggaagagaggaggccctggttcagcacaccttgccaagggccccttgggaaggagcccccgtcatacctttgcagatctgtatctgtggctcagctttcttccagctgtcaggtgactctctcatggttattgagcctggccccgggcccagacatcgcacggaggaggctgtgatgagggcgatgcctatctcttccggcttaccactgactttcctgtcagatgagtcaacacgtgcccagtggtgcccctgtcagagggtgcagtctctccctgctggggtggggtgggtggaggtgtctggagactgaggtactgaatatagagggctggatagagtgctactagggaccacacagcctgttctctgctctccattgcaggctgtgagagtgatctgctcctgacagcctttgttggacggagttccatattccttccccactgaaagaatactctcctctttttaaaaaatatttacttatttaatgtatatgagtatgctgtagctgtcttcagacacaccagaagaggacatcagatcccattacaaatggttgggagccaccatgtggatgctgggaattgatgctgggaattgaactcaggacctctagaagagcagtcagtgttcttaacagctgagccatctctgccacctacctcctttttcttttttcttttttttttggtttttcgagacagggtttctctgtgtagccctggctgtcctggaactcactctgtagaccaggctggccttgaactcagaaatccgcctgcctctgcttcccaaatgctgggactaaaggcgtgcaccaccacgcccagcttttttttttttttttttaaacgtgaatggatagagacctgataatgtgagcccaacagacagcctctggccctgggcagattgaggatgtgtcaggtgacttttgaagtgcataaaggaacacttcagatttctctccctttgtaagttagatatggtcttgaggtagttttgaaactcaccagctcttcagggtgttgtgggacctctggggatgatgtgggagccagatagtcggcatttctgtaagccaaacctagacacacctaaccaactgaggcaggcggctgctgctgctgctgcagatagggtttctcaccatgcctttggcctgggaggagtctaaggcctgtttgtttgtttctctgtgtttgtataaagactcaagcagaaatggaagtcagaggctgagaaggaaagcaagacgacctctcctccacccccaccgtattccttgggcccactgaagccgaccttccttctggttcctctcctcaccccacacagctctgggtctgacaataccgtaaaccacagctgcctgggtgtcagggacgcacagagcccttatgacaacagcaacagagactacttattccccagataatcatctggatggtacctggcagctggcagggcaccacgagatcagcacacaagtttctcatgcgggtcccatccacctggggtggggtggggcgggcggggctgcagcttcactaacccacaagagctctgcacaggttctgagtaggtgcagctggtgctgcataggctctgaaggaaggaaggggctgtgaggaacacaggccattgtgaagacagcttgtgatgactgaatagagatgcccgtcagctccacatctgatagtggctcacaagctgcaccctcaggaggcctcagaaaggggctccaaaggctgccccagctgcctcgctctgcctcactgccccaagccaccttttagctctcgaactcctaaagtccaagcactttgccattctctttccgaggccactgaggccgggtggaagcttggttccgatttccttctcaacatctggaaagcagctgggcccggtggtggtgactaatatctcagggcctgatggtttacgcgagtgacaatttctcacaagcagtttttaaatgtgaatgatgaccccaggcactgctggctgcggaggcttcattttcctcttcgatctcaggacttcaggcgaaaagcggagtggaagtagagagcggatgggtgtccaccgtcctcatggtacttgcgggaggtacagcctggaaaacacgtttcctgtccccctactctcccaggagagggatgatggtagggggtgcctcttccagggcggagagaactactttaccccagccttgcccattctgatttcaactggactggagctactaggaaagtcgacattcatgcaaaaagaaaaaacgttaactagcaagaatgcactttcattttggtttttagagaactgttgcctgtttctctcaagagtctggaagaggccgctcactgcacactactgtatgaaccctcactgcccaccctggaggaccaagtgcagtaacggtagcccaaacaccaagtcaagtgaaaatcgagggaaaaaaaaaacaaacaagcaacaaaaaaaaaaaaccaaaactaaactaaaaaacaaatcacccccccaaaaaaaaacaaaaccaaaaaccaaaaaaaacaaaaaaacaaaacaacaacaacaaaaaaaacccaaaccaacccgctgtttcctataacagaaaagcctttggtttcattttttattttgatttttttgtcttaaaaagtataaaaatagcctgtccatgctctgcttcagggaatgagcctgtgaacactcccaggcgcaggcaggaagggtgtctgcttcctgctacacctcactgccaccttggccttccttgctttacgtttgactgagtggcctcagatgctttcccctggggctttgaggaatccagtgatgttagtggtcaccgaggagaccacagagccacagtgtggtgcttagattaaagtgacttctgcaaccacagcaccccacacctgccgtcttactgaactatgccagtaacttgccttttctgccaccaccacgagacgagacgggcagagctcggaagctgtcaccccatgccctctgcttgtccgctctaggggccactgacctaagcattagttattttattttattttatttttttgtgggttttgtacattttaggtcctgttgctgtcttagaaaaggctctgtaggttgacagaaaatcaggccaagtattcatgttttgttttttttttttttccttctttcctcctttgctaagtttttgggactcaagggtagcaaaactgctgtgaaagggaaatttattaaaaatgttacagatcgtgatcttcaggggatcggcgactgtgctcactcacagttcttcagtccctcacagggctctgctgttacccaagccaggcagagcaggcagacggaagactgaaatccagatagctcattatctctgtgagttaaatggctttgatctccaagttgttttcactattgttgtaaggggatagcctccccccaacccgtatcaaaaggatgctttttccttttgactttttataagctaagtcaacaaagtctgtttcgtccggtttcgttcacttcacacaggtgtatgccctcagctgcttctggtctcaattctgtgcaagctgaataggtgttccatcctcgggtcattcttactggagtttctgcagcccacaggctgccttgtcaacagtaccacttaacaccagcattcagcgaccaggcagccaaatgcctggtctagacagagatgatttaaacatgatctttgttgcatggtagaaagagggaacacatactggttctagttctaaggttcttagatgtttggtccttctggcattagtgaaatagctttaaactatttcaagggagaagccttggccacacccacgacatttggccgacagtcctttctctccatgagccttgccttcccacctggctgaaagctcacactgaatctttcctgtgtccttggtgtcttgggagaaagggaaccccggtgtgggctttactgccggcattggcttggagccagcgtggagcagagcccaacagggtgggccaggcttagttatggtgtgccggtttaaggaatgcctggtttgcctggttgcnnnnnnnnnnnnnnnnnnnnnnnnnnnnnnnnnnnnnnnnnnnnnnnnnnnnnnnnnnnnnnnnnnnnnnnnnnnnnnnnnnnnnnnnnnnnnnnnnnnnnnnnnnnnnnnnnnnnnnnnnnnnnnnnnnnnnnnnnnnnnnnnnnnnnnnnnnnnnnnnnnnnnnnnnnnnnnnnnnnnnnnnnnnnnnnnnnnnnnnnnnnnnnnnnnnnnnnnnnnnnnnnnnnnnnnnnnnnnnnnnnnnnnnnnnnnnnnnnnnnnnnnnnnnnnnnnnnnnnnnnnnnnnnnnnnnnnnnnnnnnnnnnnnnnnnnnnnnnnnnnnnnnnnnnnnnnnnnnnnnnnnnnnnnnnnnnnnnnnnnnnnnnnnnnnnnnnnnnnnnnnnnnnnnnnnnagggtctgccaaagtgggagggggcaggccagctggggagggtctgccaaaatgggagggggcaggccagctggggagggtctgccaaagtgggagggacaggcgctggggagggtctgccaaagtgggagggggcaggccagctggggagggtctgccaaagtgggagggggcaggccagctggggagggtcctggggctggcgctggggagggtctgccaaaggtctctccagcctctgctgctagtgtagttgggtgccagttccaggaagtttctatggcaaccttaatgcgccttaaggaacactgtcaggtttgtgaacatatgctcagatggagatcttgtttccagggaaaggactggtacagtgtgtagcaagctggaatggacagagagactttggcaagagatcatatccgttaaaaacaggatacctcaatgctacatgtttttatctttgagacaatatttttaaggtttttacgctctgtcccctgtgagctgatacctaagacctaagtcagtgcttttttaatgcctttttgccctcttgtttgctttaaagtgaaatttgtaactgtttggaataaataatttctaaagttgcacgtgagatgttcttctgctttgggaacctggtcattaaaaggaaaaccttccttccatgatgagcgaggagtaaagaatgaggaaggctaactaactaattaaataggactgtctctgagggcacagcggctcagtcctctaacccggctcgacactaggaaggcagaggcgggaggatttctccaagtttgaggctagtgaggccttgtatgtcacttatactgccctcacagacagacagacaggcagacacacacacacacacacacacacacacacacacacacactaaacctgggactagcaatttctcaaaaggttttagttagtaaacattctccccaaaccaaggcctgggatttctggaaggaaatcagaggctcatgtgtctgtcacgtttgcattgttcagcattaccagatagaggcatgttagaaaagtgaaggaaggcccactacttaggtgtgtactggactatggaggtgagaatgggatcctgagagccatcccgagctttcttggtcatcagatggctgagtctgtcctccactgaaaaagatcttgggcaagaaaaacttgggacccagccttctctatgtcccaaacagaaggaaacccatcatgtggatgctttgcaggtaagagtaggggtggctgctgagggccagcctcagcttggtttgggttctgagagaaggggtgtctgggagca

SEQ ID NO: 140 - DNA, 1166 bp, Mus musculus
agcatgctgaccgtcggctgcacgctgttggtcgccctgctggccgcgcccgcggtcgcgctggtcctcgggagctgccgcgcgctggaggtggcaaatggcacagtgacaagcctgccaggggccaccgttaccctgatttgccccgggaaggaagcagcaggcaatgttaccattcactgggtgtactctggctcacaaaacagagaatggactaccacaggaaacacactggttctgagggacgtgcagctcagcgacactggggactatttatgctccctgaatgatcacctggtggggactgtgcccttgctggtggatgttcccccagaggagcccaagctctcctgcttccggaagaacccccttgtcaacgccatctgtgagtggcgtccgagcagcaccccctctccaaccacgaaggctgtgctgtttgcaaagaaaatcaacaccaccaacgggaagagtgacttccaggtgccctgtcagtattctcagcagctgaaaagcttctcctgccaggtggagatcctggagggtgacaaagtataccacatagtgtcactgtgcgttgcaaacagtgtgggaagcaagtccagccacaacgaagcgtttcacagcttaaaaatggtgcagccggatccacctgccaaccttgtggtatcagccatacctggaaggccgcgctggctcaaagtcagctggcagcaccctgagacctgggacccgagttactacttgctgcagttccagcttcgataccgacctgtatggtcaaaggagttcacggtgttgctgctcccggtggcccagtaccaatgcgtcatccatgatgccttgcgaggagtgaagcacgtggtccaggtccgtgggaaggaggagcttgaccttggccagtggagcgaatggtccccagaggtcacgggcactccttggatagcagagcccaggaccaccccggcaggaatcctctggaaccccacacaggtctctgttgaagactctgccaaccacgaggatcagtacgaaagttctacagaagcaacgagtgtcctcgccccagtgcaagaatcctcgtccatgtccctgcccacattcctggtagctggaggaagcttggcgtttgggttgcttctctgtgtcttcatcatcctgaggtgaga

SEQ ID NO: 141 - protein, 387 aa, Mus musculus
SMLTVGCTLLVALLAAPAVALVLGSCRALEVANGTVTSLPGATVTLICPGKEAAGNVTIHWVYSGSQNREWTTTGNTLVLRDVQLSDTGDYLCSLNDHLVGTVPLLVDVPPEEPKLSCFRKNPLVNAICEWRPSSTPSPTTKAVLFAKKINTTNGKSDFQVPCQYSQQLKSFSCQVEILEGDKVYHIVSLCVANSVGSKSSHNEAFHSLKMVQPDPPANLVVSAIPGRPRWLKVSWQHPETWDPSYYLLQFQLRYRPVWSKEFTVLLLPVAQYQCVIHDALRGVKHVVQVRGKEELDLGQWSEWSPEVTGTPWIAEPRTTPAGILWNPTQVSVEDSANHEDQYESSTEATSVLAPVQESSSMSLPTFLVAGGSLAFGLLLCVFIILR

SEQ ID NO: 142 - DNA, 81968 bp, Homo sapiens
  misc_feature (1)...(81968): n = A,T,C or G
nnnnnnnnnnnnnnnnnnnnnnnnnnnnnnnnnnnnnnnnnnnnnnnnnnnnnnnnnnnnnnnnnnnnnnnnnnnnnnnnnnnnnnnnnnnnnnnnnnnnnnnnnnnnnnnnnnnnnnnnnnnnnnnnnnnnnnnnnnnnnnnnnnnnnnnnnnnnnnnnnnnnnnnnnnnnnnnnnnnnnnnnnnnnnnnnnnnnnnnnnnnnnnnnnnnnnnnnnnnnnnnnnnnnnnnnnnnnnnnnnnnnnnnnnnnnnnnnnnnnnnnnnnnnnnnnnnnnnnnnnnnnnnnnnnnnnnnnnnnnnnnnnnnnnnnnnnnnnnnnnnnnnnnnnnnnnnnnnnnnnnnnnnnnnnnnnnnnnnnnnnnnnnnnnnnnnnnnnnnnnnnnnnnnnnnnnnnnnnnnnnnnnnnnnnnnnnnnnnnnnnnnnnnnnnnnnnnnnnnnnnnnnnnnnnnnnnnnnnnnnnnnnnnnnnnnnnnnnnnnnnnnnnnnnnnnnnnnnnnnnnnnnnnnnnnnnnnnnnnnnnnnnnnnnnnnnnnnnnnnnnnnnnnnnnnnnnnnnnnnnnnnnnnnnnnnnnnnnnnnnnnnnnnnnnnnnnnnnnnnnnnnnnnnnnnnnnnnnnnnnnnnnnnnnnnnnnnnnnnnnnnnnnnnnnnnnnnnaaaaatacggccttcattcttacttccacatttattaaataagaccttgaataaagtcatgaatataactttttattcataaaacaattatttattgagtgcctactctgtgcctagtattgttttatgcactgaagataaagcaatggctagacagacacagtgcccatgggaatgtgtagaaggattttaagcagaaaaataacatgatctaatttacatgtttttaaagcatcctggctgaaatggggagaatagattgaagtggaaatacttaatgggagaaatcagtggttcatactttagaagtctgagagagatggtagttaacttggacatgtatggtagcagtgaatgtggagagaggcagatggatttgaaatctcttctcgaggttgaagcaacattgtaagaactggatgacagaggagaggaagaaggagttaaggatgattcttaggtttctgacatgagcaaatggtgggacaagtcccttagatagagaatataaggggagagcaagtagtgacaggaagatgaggctcgggtttggatatgttgagtttgagatgtgtatgagatctccaactgcagatgtcaggcaggtagtggtagcacagggaaagttgcttcttaagatgggagagactatagcatgttaaatgctgattggtaggattcactggagagggagaggtttaacacaggagaagagagggataactcacggcttaaggttctagagaagaggggtaggagtaatccttggagatattagcattagatgagaagggcaaaatctgtgccttatttatctttgaatttgttgtagtggggagaggggcaaaaaaagtctggcacatggctgtcattaatgaataattatcaggctggatgcagtggctcacgtctgtaatcacagcactttgggaggccgaggagtgtgaatcacctgaggtcaggagtttgaggccagcctggccaacatggtgaaaccccatctctactaaacatacaaaaattaaattagcttgcccacgaacacttgttattatatgactttttgattatagcaagttcaaatactttatttatttgagatggaatcttgctctgtcacccaggctggagtgcggtggcatgatcttggctcactgcaaccttggcctcctgggttcaagagattctcatgcctcagcctccagagtagctgggattacagacatgcaccaccacgccccactaatttttgtatttgtatatatttttttggagatggagtctcactctgtggcccagattggagtgtagtggcggtgggggatctcagctcactgcaacccccacctcccaagttcaagtgattctcctgcctcagcttcccaagtagctgagattacaggtgtgcaccaccacatccggccaatttttgtattttgtattcaccatgttggccaggctggtcttgaactcctgacctcaagtgacctgctcacctcagcctcccaaagtgctaggattacaggtgtgagacaccgcgcccgacctaatttttgtaattttagtagcaatgaggtttttccctgttggccaggctgctctcaaactcctgccctcaggtgatccgcttgccttggcctctcaaagttttgggattacaggcgtgagccaccgcgcccagccttatttttattttgttttttacctttcctatggtgctgaaaaaacttttaatctttatgctgtattgcttcaaatttattaaaattatggtcagcctaatccattttatgggccagaaaattgtacagcatgtttagaaaaaaagatttatgtaatggttaatataaataaggttttttccttggagggaaatttcacttaacagaaaaaaatcgattctaactaatatccaccttcttcctcttctccctggaatggatgaggttaccatatgtacagattattgtcattatcaggctgagcatttactgggtgccaggattgtattaagtactgtaggtagttttctcagttaatcctcacaataaccctgtgcagtagacactcttaatattcccattttatagaaaaggacagtgaagtttagataaaattacagcatccaaggtcccagctggtcaatggcagagctagatttgaactcaggcagtttggctcaggaatctgcttacatgtctgtgtctacataaatagctcggcatagacaaatgattgctaaagagcatgctaataatgaatgcaaatggaacacatgattggcaagtgaagggtaattattactcaaccctcattctgcacaaatccacagcataatgcagcctctgctgggaagtgtaagagcaaatagctcacgcatatgtgtgaagtccaagtttagactatcttccaggaaaggtacaatggcaggcagaggtagtaactgcagggccctagctctgacaagagattactgttaacagcagaagcaaacccgactgaaactgttaagtcagctagtacagtaagtcctcacttaaccttgttaacaggttctcgaaaactgtgactttaagcaaaacaacgtataatgaaaccaattttaccataggccaattgatatgaactagagttaagtttctacgacatttctggtcacaaagatgtaaccaaacttctaaataaagaccccaaacactgctaatatcaaacattgaaataaatgtgagctatatatacatttaagaaagattaataaaagcaatgaagaaaattatgtacccatttatttcagtttagtgtctctgttgtgggtggcggagcctggaacctatcacagcaacttggtgcaaggcaagaaacagccccagacaggacgctatcccatcacagggtacacactatcccatcacagggtacacacacacacacacacacacacacactctctctctctctcgctctctctctctatgtctctctcagactgggacagtttagacatgctaattaacataacgggcacatcccagagtaccagaagaaaacccacacagatatgggggaagcatgcaaactccacacagacaggggcccaggctgggaatctatttttttttccttattaaaattatcacttagcctggtgtggtggtgtgcacctgtagtcccagctactcgggaggctaaggcaggagaatcgcttgaatccagaaggcagaggttgcagtgagccaagatggcgccactgcaccagcctgggcggcaacagagcaagacgtcatctcaaaaaaaaaaaaannnnnnnnnnnnnnnnnnnnnnnnnnnnnnnnnnnnnnnnnnnnnnnnnnnnnnnnnnnnnnnnnnnnnnnnnnnnnnnnnnnnnnnnnnnnnnnnnnnnnnnnnnnnnnnnnnnnnnnnnnnnnnnnnnnnnnnnnnnnnnnnnnnnnnnnnnnnnnnnnnnnnnnnnnnnnnnnnnnnnnnnnnnnnnnnnnnnnnnnnnnnnnnnnnnnnnnnnnnnnnnnnnnnnnnnnnnnnnnnnnnnnnnnnnnnnnnnnnnnnnnnnnnnnnnnnnnnnnnnnnnnnnnnnnnnnnnnnnnnnnnnnnnnnnnnnnnnnnnnnnnnnnnnnnnnnnnnnnnnnnnnnnnnnnnnnnnnnnnnnnnnnnnnnnnnnnnnnnnnnnnnnnnnnnnnnnnnnnnnnnnnnnnnnnnnnnnnnnntatatatataatttcaaaacattgacctaaacgatgtcatcagaagacctgctaccaatggccttccattttaaatccatgcagcttctgagaaggggcctcacagagcagctaatgaccaaattctacttcaacatcttcattttatgggtgatataatgaattatattttaaaaaacatttggatgaacttctgtgtctagaaagaatacgttttgggaaagtttacttatttacatttatttaacaaaccctcatatagagtttatcatgtattgtcattgttataaatgttttacatatgttaactaatttaattcccattagaattctatgagggtacttcccccctattttttagatgacgacattgagacacagagaagttgagtgacttgttcagagacaaacagctgataagtggcagagctaagatttgaacccagacactttggctccagagtttgtgttcatagaattatattgtatagtgcaccaaaaaaagtgcactatctttaaggaatctcgttatatatcctttaaaaatatgagttatcttcccttccccaccaactcaataatgcaatctgttttctggatttccaagcatctagcttgtttaattttataattgcgatgctttattaaaaatgtggtaaaatatacaaaacatgaaatttcccattttagctttttatttatttatttaagataaggaaggtctttttctgtcccccaggctggagtacagtggcgccgtcatagcttgctgcatcctcaaactccttgcctcaagctatctttccaagtagctgggactacagatgtgggtcaccatgtccggctaatttttaaattttttgtagagatagggtcttgctatgttgaccaggctagccttgaacgcctggcctcaagcaatccccctcatttgggcattttaaccattttttaaatggttcagtggcattaagcacatgcacattattgtgaaactataaccactatccatctccagaactcttttcatcttgcaaaaacggaagttctgtacccattaaacaataacttcccgctctcctcctactaacccctggcagctaccactctgcttcctatctctattaatttgactactctaggtacctcatataaatgaaatcatataatatttgtccttttgtgtctggtttatttcacttagcataatgtcttcaaggtttatcatgttgtagcatatgtcagaatttccttcctttttaagactgagtaatatttcattatatgtacataccacatttttttatccattcatctcttgatggacttttgaattgtttctactttttggctattgtaaataatgctgctaaaaatacgggtgtacaaatatctgtttgagtccctgctttcaatttttttgtgaatatatccagaagtggaactgccggattatatgacaattctacatttaattttaattgtgatgctatttatttatttatttatttatttatttatttatttattgagacagagtcttgctgtgttgcccaggctggagtgcagtggcacaatcttggctcactgtaacctccgcctcctgggttcaagagattcttgtgcctcagcctcccaagtagctgggattacaggaatgcgccaccaggccaggctaatttttgtatttttagtaaagatggggtttcaccatgatggccaggctgatctcaaactcctgacctcagatgatctgcccgccttggcctcccaaagtgttgggattacaggtgtgaggcattgtgcctggccctatttttatttttatttttaaagacggggtcttgctcggtggcccaggctggagtgccaaaggtgtaatcataggtcactgcagccttgacctcctgggctcatgcagttctcctgcctcaatctcccaagcagctgagactacaggcatgtgccactatgcccagctataactgtgatgctttttagcagttaaaaatcataacattctctaaatattacaagaaggggataaacttttatgaaccctttctgagaatggtgctaaacaaatcccttttctgggtgtaaactcacctggtgaggcaatggggagccagactgtcatgctgccggagccagggatgctgcattcctccactgtgaaagcgagggtctccacaggcaggctgaggccctcagtgggccctggctggggcctgactctgagggatgccactggccagacactgagttctgttattagacctctgtctgcccacgtaacctcctcccaggctgatgagaaagcaggaggggaaggtttcagagaataagaagcaccttcctgtaattattgattaaccaggggctggctccagggccagaggccagggaggggtctgcaggtcagttcagccctaccccactgcacttctcagaataatcgttgtccctaaagatggattcacatggtgaatagagaataaagtgcatagttttaaactctcacagttgagaatggccccaacacatcagcccagacctggaggttgggggcagggtgggaatttaaaaagaccactttgagtcagggtatctgggatcttgaccagctctgtcaccactgcctgtgccatctttaccaagcaacttctcttcttgaggcctagctccttatctaaaaagtgagggaggagaagcaatgatgaccaagtcccttttggtttcaaaataaccttacatatttattctgtgggtctcctgtagacttctgctttaggcaaactttaagatgcttcatcgcttcaggtgaaaggtgagagaggacttgcttgctgggagtcagcctagggcttccccctttacaggagacggagggtccctgcaggaacaccggtgaaggagagggtgtcccacacaccaggttctgctctctgctctcccctcacagactacagaacaccaagtgcctgctgccatggtctgcagtgtctttggtcctgggtgggccgaccgagcccttgctcagtgagagtcctgggccaggagccagacctcaccctggagctgccagttactagtagtgcagttttgaacaagccactttacctctgttagcctcagtctactcatctgaaaattgggggcaatgtctcccagcattcagggttgagaatttcagaggagattgtgtatgtgaagcaatttgtaagcagcacagttatctgagaagtgttctggctcagacaactaaagtcttcattgttccttctgttgtctgggtgagggcaggtcaggctgaattgtgcaggtatgctttcttctctttcttttttctttttcttttcttttttttgagagggagtttcgttcttcttgcccaggctggagtgcagtggtgccatctcggttcactgcaacctccgcctcctgggttcaagtgattctcctgcctcagcctcctgagtagctgggactaccggtacgcaccaccatgcccggctaatttttgtatttttagtagagatgtggttttaccatgttggtcaggctggtctcgaactcctgacctcatgatctgcccaccttggcctcccaaagtgctggaattacaggtgtgaggcaccacgtccggcctggccaggattaaattttttcatgtgaaccacaacactaaaactttgtatattgctgcgcttatcttacaaatcaggaaataggggttcagagaagttaaatagcttgcttaagtcacacagccagcaagtggtaaagctgggatctgcatgactacagagcacacaggctccccaccagtagattagagagggggaggtctgctttggtgcagagacaggtgggatctgtgatgcccgttcttggtttcaacattcttttaaactctcctatctgagcctaggactttctgcagccttcctgttttaggctggcagctcacagtccctctctggttattttcaggtctgtgtgtgccacagagaggaagggggcaaccacagtgggaaccgctttccagccctgctgcaaccccttttgaaatagcaggcgagagggctggtggcctccactgtgctcttctgttcctgtctgtgggcatggctaaagcaaacaagctcacccacaccagctcccatcgtgcggtggatcagtgcatgtgcttggttctgtctggcactgctgatgggtggttcctacagaaagatccagatgcacggggtctgaggactgtttcagaagctctgtccgtccatgcttggccctgtccacttgggagttccattaggccatgcctgttccagctgtcccaggatctttgatctgggttaggattggcctgaaaccaaaggtagaaaaacacattctaatgagcagttgctggtctagaagcttctcagcctaaactttatttcagcatttttctttccctccagattcagctatgaggccatcctatcagctttaggctctgtgggggtccttgagagagttcccctccaagggacggacagatggtccccttcaaggtccttgtggttgctcaaaagccaggtgcttgtttctttctttttttctctccttcctttccttccttcccctctatccctccttccctccctccctccctcctcccttccttttctttctttcttttcttttttttttttctttccagacagggtctcactgtcatccaggctggagtagcagcccccaatcacggctcactgtaccctggatctcccggactcaagcaattttcccacctcagcttccctagtagctgggactataggtgtgtaccaccacacccagctaatttttaaatttttttatagaaatgggggtctcactttgttacacaggctggtctagaattcctggactgaagcaatccacccacccggctctcccaaagtgttggggttacaggcgtgagccactgcccctggtgttagtgtctgtctgtcaagtcaggagggcagccatgaacgttctgatgtctactgagcacgtgtggcccagaccgtgtgtcaggtgtttaggtgccatccacagaaccttcctaataaccctgggcagcataggctttcttatctctgacagatgaggaaatggagactcagattctgaaccgaagtcacagacacagtagatggtaggtctaaatggggacccaggtctatctgactgcaaagtccaaaccgtttccttgcctctgctgcagcctgcgaggagcagctgggcagaaagactgtgcctttacggtggtgagtcttccgatgcccaagcctcaccccagaccgatgaaatcagaatctctggagacccgacccagacattggtgggttttagggctcctggctgattccagtgggcaaccgggctaccaagcactgttttaccctaagggtaagaggaacatcgcctcctcgagggctctccaggtgtgcctttcacagcgtaatcccgttcacgaaaccaaaaatcaaaactaggccactgcccactggtggctgatacgcccttttctcatcaacagaaccgggaggaagggctctggtggggctggcggtcccctgttctccccgctcaggtgcggcgctgtggcaggaagccaccccctcggtcggccggtgcgcggggctgttgcgccatccgctccggctttcgtaaccgcaccctgggacggcccagagacgctccagcgcgagttcctcaaatgttttcctgcgttgccaggaccgtccgccgctctgagtcatgtgcgagtgggaagtcgcactgacactgagccggaccagagggagaggagccgagcgcggcgcggggccgagggactcgcagtgtgtgtagagagccgggctcctgcggatgggggctgcccccggggcctgagcccgcctgcccgcccaccgccccgccccgcccctgccacccctgccgcccggttcccattagcctgtccgcctctgcgggaccatggagtggtagccgaggaggaagcatgctggccgtcggctgcgcgctgctggctgccctgctggccgcgccgggagcggcgctggccccaaggcgctgccctgcgcagggtaagggcttcgggcgcacctggagggctggggcagctagcggctgggggaaaccgccttggtcaccgcagtctgtgggaggctggagggaggaaaggaggtgcgacggatccccttttctgtggctgccttgaggccccgcgggtacctagctgtgtggtcgcgggtagtggctcttgcgccccctgctgcgcttgctcccttggtccggagcgctccccggaatgcccggtgaagctgtgcgggaaccctgcggtctgtgtacaggactgtgtccttgcaaacctgactctcgagcttccttcccagtgcccccaggagcctttacacaaccgcgtcccaggttactctaaggggagactgcccgagagggcgcgccccagcggggtgatgtacccgcctggggagtcctttgtaccagcgcccctcttctccctctgcattgggggtccacctcgcctggtcctccccccacccccgcgggtgcatgtgtggatgacagtgccctgactatgaagggactgacatcacgggcgctgagtcacggatcttcccgctgcacggagtcactttggcagccaccaactctgggaagccaagtgccccagtcctgggaattgagtcgggaggctggcaagggagtgagacctcctggggctggcacgtgctggactcccctctagaaaagagaaggacccgtgagggagagggcagaggcacttactgctcccgttgactgtaatctgcccctggcaaaccaggcttttcttgggctctggccgcatgcccagctgcgtgtctagtctctcttctggaagagttgggcaactggctctccagaggtttattttagggtcccagtgcttctttgaggacacagcagaaaactaaggggcagctgacaggcttctggaacagctgacaggctggggaggctgaaggctaagactttcaaccactagatcacactgaattccagtcctaggtgaacactgatctctccctttgaggaggtgactttctgcaactagaggctgagctggagtgtctgaggctctctttgctttttggatggttgtggtccttatgattggaagaaaaaaagaagggattccattttcaatacacatttataactcctgccagtaacagacactgttgattggggcacccattcaatgttttctaatcctccactgtatctacatataactttgtttgaaagaggagactgaggttcagggaggttgggatggcgggatggcaggttgtcaggccccggtgatggaggccaacccctcccgtggctctgtgctccagtgtggtagatgtctaagactctcaaatatagaactagatcagcaggcagagctgggggcattggggcaagctgagagtcactcttgtctggctgagtgctgggacagaaaaggctgagggagggaagtggaggcccaggcttgcccatggtggtgttagagggatgcaagacaggttccagggctcggatggcctcaggagcaagcagggctcccttggctgcctctgctgctgtcacgccagcccaaggctcctgccccagggaggttactgttactgctgtagttgccaccacctgttgctcctgagtggatgctaggcccttccagggcagccagttacagtcagttttccatttccctggtgctcaggaaggattaggagaggtggtctcatggcctgaacagcccatgaaaggcagaactgagagactggggaggaagtgaaagtcctcccagctcagaaggaaaatgcagagaagtagaaatacccagcccctctcccacacccacacagactcagcccacaaactggagagtaaaaataaagaaatcgtacaggaagcatggagcaaatgactgtgagatgtttcgctttagagaagtgaggagcagagggggagcagaggctggagttggctgagaggggaaatccgcaggtacagcctgcggggctcttagagcccagaggtttgttttcctcgggatcagctgccgcccacacaccctggagctgccaggacttctcaggtgtactcgttgtctaagggcctggactagctgggacttaggcttctgccggttccaacactctggtgctggaaggctggacttgggtgactcaagttccctcttcctactgcaatgcaagaaaatacacaaaagaagtatgtatacctttaagtatctcaaagagctatctcagcttctgaatttccttctagggcacctcttcctgcccccattacccacacacgtgcctagcctcaccctaaatcagtatttctcaaaagcttagttctgagcctagcatcagatctggtgtgtgtgctgggtgggagggctttggtaaacatgatgatttttgaaccctaacccagatttattaaataagaacacctaggagtgaggcctggggcatgtccttttaaacaaactgccccttgtgattcttaggcactgtcaggtttgaggacggctgcctaaatggtgtcattgaggaactgaatgaaggccctcccgcttcgggctctctgttgccagaaatctctccttgctttggcttgctgcttgtttattcattgcagcaaacatttcttgagtcggtgtagagcctgtgaggcctgtgtaggatcagctatgcagactccaccctaaaaggagcctgaaaatggtcatgggtaaatcctgagaagggctgagaaaccccagactctgaccgggccactgggtaccaactacccgtgaacagattgtctggcttggggtagggggtggttagagagaggaagttcctctgactgaggaccaagatcccaaggcagcaggcacactgatcctgaccctgaccctcatctccagccctcagcagccagggtaaacaaatactcccctcactgggtatttgtagattacacaaagtaacctaggtgctgactgctgaaaatatacactcccttcccccgtctcctgaatcctggtcccaccaggcctggaagccacagacccagcaagcaaaagagtttccagtcaatgaatctagtctggattgaagctgtgctctgtaatacggtagccactagccacgtgtacctatttaaatttaaattatgccagcgcagtgactcacgcctgtaatcccagtactttgggaggctgaggcaggaggatctcttgagctcaggagttggagaccagcctgggcaacagggtgagatgccgtctctacaaaaagatttaaaaaattagctgggcacagtgacatgagcctgtagtccctgctactgagaaggctgaggtgggagaatcacttgagtccagtctgcatggagccatgtttgcactaccgaattccagtctgggcgacaggagaccctgtctccaaaaaattaatttaaatgaaatcaaataaaaacttagtttcttagttgcactagtcacattttaagtgctcaacactcacattgctagtggctactgtactgaacagtgcagatacagatctcttccatcatcgtggaaagccctactggacggtgctgggctagagtgttaaccagtttcttccagaggttttctgttctcttttcctttatccccctctgccttctgctctcctccacctgaacacagctcattttgcataggtgatggctaaggtcttcaagccaggcacatctctgccctgcactgccaagtaaaaatgataacaccttgggcaagtgatttaacttctttgacagccagtgttctagaaaatagaaataattgtattacctcgaagggtggttatgaagatgagatgagctaagtaaggtatgaaatagagtgtttacagaagtccctaacacacagcaagtgcttaaataagtgtaggtgatcattcattcactccaaaaatatatttttggagtgaacacctcctactctgttccaggcactattctaagagctggagatacaccatgaataaaagagacaaaaaccccaggcttagttgagtttcattctagtgtgggagactattaacaggatgtaaattaagtatgtggtatgctagcgactagtgctaaggagaaaaactaaagccgagagggagacagaccccatgtgtgtttgtggcagggtggggtggcatggtgccttggatgggaggccagggaatgccttgctgagaacataatatttgagtgaagacctgaagaaaatatacaaatctctagagattccctatatgtccatcttgggcaggaaaattcttgcctcctctttaacaatgtgtactacctgagggtgtgttatgttctggagcagagggctctgtggggacacatggatgctccctgccctggagaagtatctctggggtaacaagtcctcagccctttagctccttgaagtctagcagagggaagtgctaaatgccaggtcataactgcaagtctgcaggtgggatccttgagggctggagtggcaaggggaaggtgacaaagaaaaggccttttttttttttttaaatacaggatcttactcccgtagcccaggttggagtgcagtggcacaatcactgctcactgcagcctcgacttcctggtctcaggtgatcctcccacctcagcttccggaatagctgggactacaggcgtgcaccaccacatctggctaattttttgtatttcttgtagagacaggatttcgccatgttgcaggctgctctggaacacctaggctcaagcagttcacccgccttggcctcccaaagtgctgggattacaggcgtgagcctttgtgtccagctgggaggtttttttgtgtagttaatctgtgttctttaccctctcctcttgcctgggatctgaagaggtcaaaagtccctggcaaaggcagaggcttttctgccactgggttcaggcttgacgttagctggacctcagcagcctcccccactcctgctcatcccttgccagctctgtcgggtgctttctactcttaggagtatgtccctgaggccctgcatccagcctattctccccagcacctgttctctgaatcagttcccactccacttcccaaccgctttcccgaaaagcatcctttggtcttccctctctatatgatggttacaataactgttaccatttatggtgtgtcaactgtgtgcaagtagctgtgctaggcccttggcatctgtgatctcatgtaatcttcaaaacagcctcaggtgagagaagtgctggccccattgcatagatggtgggctgtaggacaagatgagaggccagttttgcacatatggaaacaaatgtcttttgttttcgtttttgttttgagacagagtctctgtctcccaggctggagtgcagtggtgcaatcttggctcactgcaacctctgcctcccgggttcaagcgattctcctgcctctgcctccagagtagctggcattacgggtgcacaccaccacacctggctaatttttgtatttttagtagagatggggtttcaccaggttgccagtctggtctcgaactcctgacctcaagtgatctgcctgcctcggcctcccaaagtgctataggattgcaggcatgagccaccgcgcctggccgcaacgagacaatcaagagaagatgctgataaggagttggatatgggagtcaggaatttgggaatgaggactgagcttgagatgtaaatgtgggagtcgtgtgctggcagatattatttcaagccctgagagtggctgaggtcccccacatctattcatatgcctttggtcagtggaatgttttgcaatccacatcactataaatgaatttcctctgtctctgagagaggccgctgaggtagcagagagaaaacagctttgagggcaggcagtccaggcctgtctccccattaactgcttcaccagctaggggacctttgggcaagtcactacaagctttaaagtataaaatactttttgaggccggatgtggtgtatcatgtctgtcatcccagtgctttaggaggccaaggcaggaggatcacttgagcccaggagttcgaggctgcagtgaaccgtgacagcaacactgcactccaacctgggtgacaaagcaagaccctgtctcaacaacaacaacaacaaaagtataaaatactgtaacagacaaaaatgcatgcttgataaatgttattgatcctaagagccttttttttttttttttttgagatggagtcttgctctgtcgcccaggctggagtgcagtggcgcgatctcagctcactgcaacatccgcctcccaggttcacgcagttctcctgcctcagcctcccgagtagctgggactacaggcatccgccacgacgcctggctaattttttgtatttttagtagagacggggtttcactgtgtcagccaggagagtcttgatctcctgaccttgtgatctgcccacctcgtcctctcaaagtgctgggattacaggtgtgagccaccgtgcccggtgagccttttttttttgtttttgttttgagacagagtctcactgtgttgcccaggctggagtgcagtggcacaatctcagctcactgcaacctctgcctcccaggttcaagcaattctcctgcctcagcctcctggcctcagctgggattactggtgcctgccaccacacccggctaatttttttgtatttttagtagagacggggtttcaccatgttggccaggctggtctcgaactcctgacctcaggtgatccacccaccttggcctcccaaagtgctgggattacagacgtgagctaccgcgcccggcctttaaaagcctattttgatgggaggagggggatgctataatgtgaggactttctcccagaaaaggagagagaggcactaatgcagtggggataataattaaaatcgcttaacattttttttgaaagattaggtatgttctgaaaatagtgctgaggtttttgcattaattatctaatgtaatcctgacaacatttgaagtacctatggttattatttctattttatggatgagaaaagtgaggcctagagaggttgagaaacaagcccaaagtcacacagctagtgagtgactgagatagggttggaacttgggtatatctgaatcctgggcttgacctgtagacccctgctcctgtggactaggaaatttaaacaaagaacttcctctttttttttttttttgtatttcattatatggatgtactgagtttatttatctggttccccccctttttttttttgagacagagtcttgctctgtcgctcagacttgagtgcagtggcacgatgttggctcactgcaacctctgcctcccgggttcaagcaattctcctgcctcagcctcccgagtagctgggattacaggcatgcaccaccaagccaggctaatttttgtatttttagtagagatggggtttcaccatgttggccaggctggtctcaaactcctgacctcgtgatccacccaccttggcctcccaaagtgctgggattacaggcatgggccactgtgtccggccacccggttaccttttgatggatgtttagttgttcccttcttgctcttacggcccctgctgtggggaataactttgcatatgcctcttgttgtgtgagtgcaagtacacctgcaggatatattccccgaaggggaattgatgggcaaaggccatgagatttgtcatcgtgagacagaatagaagttgcaccaatttatacttccagcagcattgtgagaatgcttgtgtccctatgcccttgccaaaagtgtactattaacctggtatctacacagacaatggcgtctgtgtggaattaatttgcatttatcttatctgaataagattgtatgggttttttaatgtataactgacatttgcataatctactatgacctgcctgttcatattcaatgctaattttattttgattgggtcattaatcttattgtttacaggagctcttgacatattaacatgtcatacatgacttttttttttttttttttggtggtgggggtggtttttgccaagaaatttctttttttccatctctctctctctctctctttctttctcagggtctcacggtgtcacccaggctggagtgcagtgacatgctcatggctcactgcagcctcaatttcctgggactcaagcgatcctcctgtctcagacttctgagtatgaggctcagactcaaaagattggggcttttacaggtgcacaccaccacacttgactagcctttgtattttttgtagagacgggattttgccatgttgctcagactggtctcaaactctgggttcaagcgatcctccctccttggcctcccaaagtgctgggattacaggtgtgagccactgcgcctggctgcaaatttttttttccaactagttgaatttaccagtctcttttatagcttctaggttttgtgtcatacttaataacatccttcccattccaatattttatttttatttattttttgagagaatgtcaatccacctttattggaggaaaccttgcactgtaactgttttaaataatgtgtgccctgccccaccctgtgcctggtgggctcagaagatcatctccagctgccgggcatactcggtgacctgtttggccagttctgtggagggaatggtagtgtcttctggctcctgctgctggccggcaaaactatattagttgttggggcccgggacccaccctcacttcttggtgtagtcggtcatctttttgggtgtgttgaagaagaggatctggtggcctcggtaaaagggattttctcataggctttcttgatgcacccggccatctcatccctgatagtgtcaagcaggatgtcgatgaagacggtgtagctcttggcgaggatgttacccttggccaggaacactttgttgtagctgccctccattaggtattgctccagggacacagggtttttggtgtagacattggtctggatgtccttggcaggcagccactccagctccatgtggaactcagccacccgcttctgggacagcaggaagaggagattgaggcccaagagctggtgcatgtaggctgactggggaagctgttccttgtaatcaaagtagcagcatttgagctgggtcatgtggcgctggaaggaggggatgtcctcgcataggatgctccactggccccgatcttcagtatgtcacgggccagaatgagctgctgtttggtcagcttggtccctgtggttggcaagaagttgagctccagaagaactagcttgaggcagcccagctcttccctgcacttgctaagattggggcttttacggttccactcgcccttgagttgcttgtacttgccgtcctcagcctgcaggacagggccctaggtcgccaggggcccggagctcaaggcgccggctgcactgttcacctccacccccattccaatattttaaaagattctccttttctggtattgttaaaagttttaaaagtttaaatatttgatccattttgaatttattaatattatggatgaggtatgaagtctgactccagctttttctttccagttgtcacctgacatctctttacagtttattgaattcatctttcccccaccaattttcaaagttacattttaaatctaccaaattcctgtatacttgggtttatacgcctcttggcatagcgagtagttaaaagcacaaattctgaggcccaattgtctggacttgaatgcaggtcacccctaattagctatataacctcagtctcttcttctgtcaaatagactattgagaagatcaagttagttaatctatgtagcacacttagaaactgcctgtatgtgtagcaagcacttagactaagttatttttttaatgtggtaaaaacacataatataaaatgtatcagccgggtgcagtggctcacacctgtaatcccagcactttgggaggccgaggcaggtggatcatttgaggtcaggagtttgaaaccagcatgaccaacatggtgaaaccccatctctactaaaaatacaaaaagtagccagctgtggtgacaggcacctgtaatcccagctactccggaggctgaggcaagaggggaggcagaggttgcagtgagccacgattgtgccactgcactccagcctgggcgacaagagtaagactcatcctcaaaaaaaaataaaataaaataaccattttaaagtatacagatcagtagtgcagactaaactattttttatttttattagttctgaactttctagtctcttccataatttggtctccctattcatgtgccagtatcgcactgttttaattatgtagttttattttttccttcctatttttttagaggaagggtctcactctgttgccaaggctggagtgcagtgtctcgatcatagctcactgcaaccttgaactcctggactcacgcaatcctcttgccttggctttctgagtagccaggaccacaggtgcatgacaccatgactggctaatttaaaaaaaaatttttttttttttttttgtagagatggagttttgctatgttgcctaggctggtcttgagctcctggtctcaagagatcctcccgcctcagcctcccaaagtgttggcattacaggcatgagccactgcacctggccaagtaaactttagagattaattagggaacactgatgtatttttaatgccgagtcttcctatctcttggtaggcctgatggggcttatgatgagggaggaggagctggggcaggagagcccgacattcaggtctcactgaggggagatgtgcccaggacacttccactggaactgcttccttgatggtgatgtggagtgagctggaccagtgtgtgcgtgcatgtgtctacccaagctcatggcacatgggggagcggagggggtggggatggctcagcagtgattggaatgcaagagtggggactttggggcctgtatgaaaaagtgttatggcagagtgacacacctacgaaagagtgtggtcagcataggcctcacactgggtgggtttttacaaactgaacacatgcatggaaccaccattcagaataagaactgaacagaagcatcctcaggggagccctgaaatccccctatgcacacccctcaaacctccccttatccctcccagctgctccatccacacctccacgtgacttcttaaatcttcagctttgctgcctcatagctaagggggtcagggaggggaagctggggggtctgtagatatggaatgggggtgcgtacatcaggtccctccctctccctgccctcctgccaccttccagaagcacataaaaaaaatctgactgagggccagcctctttgttatactctgagactgtgctcagagatagaagacaagacccctaggccatgcttctgggaaggcagagggctgcgtgttaagcctggaccgagagtcccagagcccagctccggtcctgacaccatgcactgctgtgtgacttctgggccctggttctcctcatccaccaaaatgagcaggttggcctgagtcgtccttaagagtcctgtatagccttaaaacagcgctccttatctcagcaccctacacactggctgtagcttctcctcactgtccctttcaggaccaaaatactgggtgtatccatctgcaggtaccaatggctttactttctaaggccctgctgcgtcctgcttttaatctctttatttctctatctgctccctggggttaggtttgggccagggagtggattgtttgccctccttagatatcctttctttttttgagacagggttgcccagggtggagtgcagtggtgcgatctcggctcactgcaaactccatctccggggttcaagtgattctcctacctcagcctcccgagtagctgggattacaggcatgcaccactatgcccagctaatttttttttttttttttttgagatggagtttcactcttgttgcccaggctggagtgcagtggcatgatctcagctcactgcaaccttccggtttcaagcgattctcctgcctcagcctcccaagtagctgggattacaggcacccgccaccatacccggctaatttttgtatttttagtagagacaggatttcaccatgttggccaagctgatctcaaactcctgaccttgtgatccgaccttctctgtctcccaaagtgctgggattacaggcgtgagccacttcacccggcctaatttttgtattttttggtatggatggggtttcaccattttggctaggctggtcttgaactcctgatctcaggtgatccgccagcctcagcctcccaaagtgctgagattacaggcgtgagctgccgcacatggccttagatatcttttcctctaattagtttataatctctgagagttgacccaggttgtaccttcttggactggagccaggtggttatctctgatgctgccagaggaggattagatgttttatctcctgagttggtcacacgcgcacgtgggtctctgagtcagcattgagcattacctgtttatgggtccaaaggagcctccctcccagaccctctctccagcagtgtacagtccatcgtgtggatgggaggaaggcaaggccaaggtaaatactgactcagacaaatacaagcaggtacaagaagtacaaatacatatgtgggggaggagggagcaggggcctgccagccaaagctagtcatctgagaagagggggttgcggacaggtggggctgggagctgagtcagagaaggttgctgggcctcccattagagcctgggagccttgacttgccgtagcctgcggccttgcctcttcctggacagtggccgagggtgccctctgaaatgttaaggagaaatgaatgggcccagatggtggggtgacttggggaggacgcgagatttggagtccaaggggaggcagttttaggctctaactcatcctatacacgctgcggctgtgggggaagggagagaaaggccaagggcacgactcctggctcctgagagtccccagtgccccattaggttggcagctgcagtgatggcgctgacccccccttgtgcacacccctcaagcctcagcattcccttccctgggcctctgaagggtggaaagatgtgagaagagcagggaagaggagaggaaattgggagagggggagagagagggtggtggggagcccagagaagggagctgggggtggagcatggagaggtacctgggccaagtagagagaggctttggccaggctcatctgggtccagcgtggattccctcatgcatgagctgtgtgaatttgggcaagttccctaacttctctgatctcttgttgcctcaacaatgaaatggggacaagacttcctccctggcagactttttgtgagtagtgtgctcttagggaaagcccagggcgcagggtaagtgtcccagttgctaatgattgttatggttattatcacatcaaagccaggagccagtctcagtccaaagatggagaatgcaagaacaggtgaccaagagcactgggacttgtcctagccctcgtgggaccaaattctatacttgtttccatgtggacacaaggtgtccacaggcttctcctggaggcttctcagcacccacctacttttagatcaagaccattattgctgacaggggacctttgtttcctctgtagccccttctgaaatcctatgcctttgcaacccaagaagctgggttaggctgggggcctcctgtgctgccagctggcctgggcagcggggacctgcgtctctgctcagaaactggggtggtgagatgggattagcaggcacgagccaagcctgtgtcctcggtggcaggccaggcagctggttcaccgcttacataaacggggccaggaagctgaacttgtttttgctggcaagagctgcggcaagctgcaagagagttgagaaatatgtgtctccgtgtgcgtgtttttctctggttattgacatttgcaagtttacttgaagagggggaaaaagtagaaaaacaacaaagctgtttggattcctggcacccaaacttaggtcccaactggggaggaaccccactttcccagagctgtgctgcagggtccccagaccaaagggtgtctgggccatggtgggggtcccagtgtccctgggagggggaatcctaggccaccggggcagggagatatgggcttgcttgttgggagttactaggacctaaactctctttcccttgaggaatgggaggcaagggaggttgtgggaattttccctcccctagagctctccagggagaaagaagcatttttctgagggcactgggatgatctggtcatcatccttctcccaaagccatcaactattaaataataaatccatagattcattatgtgttttcaagctgagtattgtttgcttcctgccctctgagagctaatgattgggcgccatgggatgctagaccgcaggagtgggggcctgtgggggatctacaggtcacagtctgaatcctcatttcacagagaaggccagtgggctctgccaggggcggtgacgtgcccatggctgcctgtgagtcatcacaagaccaggaatagaactcaggtcacctgacagcacagagctgtttcctctacaccaaggggcctcctgcttgtggagatgtactttattttattttatttatttatttatttatttatttattttcaagaaggagtctcgcccaggctggagtgcagtggtgcaatctcagctcactgcagccttcgactcactgcagcctctgcctcccggattcaagcgattctcatgcctcagcctcctgagtagctgggattacaggcacacaccaccaagcctggctaatttttgtatttttaatagagacagggtttcaccatgttggccaggctggtctcgaactcctgacctcaagtgatccacccgtctcagcctcccaaagtgctgagattacaggcgtgagccactgcaccctactgagatgtactttatattaaagaacaaatcaaggcagactgtacgtttgtgtcagcccaaccccacacaattaatagtcagtgattaaactgaccagaccagaccagacaccaacactgactgttgaggaggagcttgggggtttgttttcgggaggcaatactgcctccttttgtgatcttagtcccaggtgaggtgcttccttgtcctctctgcagaatcccattctttcttagcctgggctgaagctgctccctccctgtatgtgaccctggccttggcgcagtccttgggtgctcttcctccctcctgcctctgcgctgcttcatgatgcacaggagccaaggaggggcaggggacagtcggttttttctcagggagattggaagagaacagaaacaagaagcaatggaatgctcctgtcctggaggttggtggggcagtggggagaggtggggaagccattgagcctgcacatacttttgacaggcttggctcatgcctgccaaccccatcccaccgcctgggtttctgagcagggacatgggtccccactgcccaggccagctggcagcacaggatggcctccaacctaacccaggctcttgggttgcaaaggcatagcatttcagaaggggccacagaggaaccaaaagtccccctgcctgtggagtcaggcctgatctctttgagggtgctcacaccctccatgttcccctgtaggtcttccttccctccttactgcatttcagatactccagtcaccagccctccccagaactctcactgttttttgtttttttgagacacagtcttgctctgggtcccaggctggagtgcagtggcacaatcacagctcacttcagacttgacctcctgggctcaagtgatccttctgccacagcctcccagatagctgggaccgcagacatgtgtcaccatgcccagctaattttagagttttttggtagagatggagttttgccgtgttgcccaggctggtctcagccacctgggcacaaacgatcctcccatctcagcctcccaatgtgctgggatgacaggcgtaagccacgatgcctggtgactctcaattctttttttttaaattattattattattattttggagatagagtttcacttttgtggcccaggctggagtgcaatggtgcaatctcagttcactgcaatctctgcctcctgggttcaagtgattctcctgcctcagcctcctgagtagctgggattacaggtgtgtgccaccacgcccggctaattttgtatttttagtatggggtttctccatgttggtcaggctgctctcaaactcccgacctcaggtgatctgcccgcctcggcctcccacagtgctgggattacaggcgtgagccacggcgcctggtgactcagttcttaatgccttgcatatactgttctctctttatggaatgtaactccctgtggctccacttatcaaacccccactcatttatcaaggccccaataaaatctctcttccccctttagaataattgatccctcttcttagttccctcagtatgttggagacatttatatcaggttggcctgtattacagatagttttaagttctagggctttgtggggtttaaagaagattacgatatggaaatgataggaaggagtgccagtgcattgtagatgctcagtagcttcaatatggagttttttttttcctggattaggaacttctgaacttgcacatcatgggtgcacaaaaattattgaattcttgaagaagggacaggcataggcttgcaatcctggctctgaatgctgagcaattgctcacggacaaatgctccgttgattgtgtgctctttgctaaatttcagtgtgtgcaccagccacgccttcgcccccgcgtgccccgtctcctagggcctactatgcaaggcctgtgtcaggccggggtgggagcatgagaatgactgggcatatctcccaggaccaggaaggactgctcctcaggagccccctcctcacctggttcctcatcgtgtctcttccttttggcccttctctttggtagggcctacttagggagggccccagcagattcccaggggaacagaaaaacagacagatgggaggaatcaaggctgagcccagggtatggtgtcttgtgtccaccagggaatcaggcctacaggggagggctgggctatgggtgcagaattcagtgacagtgacagtgagagaactcagcagtgcaagggcaaagtggcactgtttggcctgaaggtgctcggaagctgcttgnnnnnnnnnnnnnnnnnnnnnnnnnnnnnnnnnnnnnnnnnnnnnnnnnnnnnnnnnnnnnnnnnnnnnnnnnnnnnnnnnnnnnnnnnnnnnnnnnnnnnnnnnnnnnnnnnnnnnnnnnnnnnnnnnnnnnnnnnnnnnnnnnnnnnnnnnnnnnnnnnnnnnnnnnnnnnnnnnnnnnnnnnnnnnnnnnnnnnnnnnnnnnnnnnnnnnnnnnnnnnnnnnnnnnnnnnnnnnnnnnnnnnnnnnnnnnnnnnnnnnnnnnnnnnnnnnnnnnnnnnnnnnnnnnnnnnnnnnnnnnnnnnnnnnnnnnnnnnnnnnnnnnnnnnnnnnnnnnnnnnnnnnnnnnnnnnnnnnnnnnnnnnnnnnnnnnnnnnnnnnnnnnnnnnnnnnnnnnnnnnnnnnnnnnnnnnnnnnnnnnnnnnnnnnnnnnnnnnnnnnnnnnnnnnnnnnnnnnnnnnnnnnnnnnnnnnnnnnnnnnnnnnnnnnnnnnnnnnnnnnnnnnnnnnnnnnnnnnnnnnnnnnnnnnnnnnnnnnnnnnnnnnnnnnnnnnnnnnnnnnnnnnnnnnnnnnnnnnnnnnnnnnnnnnnnnnnnnnnnnnnnnnnnnnnnnnnnnnnnnnnnnnnnnnnnnnnnnnnnnnnnnnnnnnnnnnnnnnnnnnnnnnnnnnnnnnnnnnnnnnnnnnnnnnnnnnnnnnnnnnnnnnnnnnnnnnnnnnnnnnnnnnnnnnnnnnnnnnnnnnnnnnnnnnnnnnnnnnnnnnnnnnnnnnnnnnnnnnnnnnnnnnnnnnnnnnnnnnnnnnnnnnnnnnnnnnnnnnnnnnnnnnnnnnnnnnnnnnnnnnnnnnnnnnnnnnnnnnnnnnnnnnnnnnnnnnnnnnnnnnnnnnnnnnnnnnnnnnnnnnnnnnnnnnnnnnnnnnnnnnnnnnnnnnnnnnnnnnnnnnnnnnnnnnnnnnnnnnnnnnnnnnnnnnnnnnnnnnnnnnnnnnnnnnnnnnnnnnnnnnnnnnnnnnnnnnnnnnnnnnnnnnnnnnnnnnnnnnnnnnnnnnnnnnnnnnnnnnnnnnnnnnnnnnnnnnnnnnnnnnnnnnnnnnnnnnnnnnnnnnnnnnnnnnnnnnnnnnnnnnnnnnnnnnnnnnnnnnnnnnnnnnnnnnnnnnnnnnnnnnnnnnnnnnnnnnnnnnnnnnnnnnnnnnnnnnnnnnnnnnnnnnnnnnnnnnnnnnnnnnnnnnnnnnnnnnnnnnnnnnnnnnnnnnnnnnnnnnnnnnnnnnnnnnnnnnnnnnnnnnnnnnnnnnnnnnnnnnnnnnnnnnnnnnnnnnnnnnnnnnnnnnnnnnnnnnnnnnnnnnnnnnnnnnnnnnnnnnnnnnnnnnnnnnnnnnnnnnnnnnnnnnnnnnnnnnnnnnnnnnnnnnnnnnnnnnnnnnnnnnnnnnnnnnnnnnnnnnnnnnnnnnnnnnnnnnnnnnnnnnnnnnnnnnnnnnnnnnnnnnnnnnnnnnnnnnnnnnnnnnnnnnnnnnnnnnnnnnnnnnnnnnnnnnnnnnnnnnnnnnnnnnnnnnnnnnnnnnnnnnnnnnnnnnnnnnnnnnnnnnnnnnnnnnnnnnnnnnnnnnnnnnnnnnnnnnnnnnnnnnnnnnnnnnnnnnnnnnnnnnnnnnnnnnnnnnnnnnnnnnnnnnnnnnnnnnnnnnnnnnnnnnnnnnnnnnnnnnnnnnnnnnnnnnnnnnnnnnnnnnnnnnnnnnnnnnnnnnnnnnnnnnnnnnnnnnnnnnnnnnnnnnnnnnnnnnnnnnnnnnnnnnnnnnnnnnnnnnnnnnnnnnnnnnnnnnnnnnnnnnnnnnnnnnnnnnnnnnnnnnnnnnnnnnnnnnnnnnnnnnnnnnnnnnnnnnnnnnnnnnnnnnnnnnnnnnnnnnnnnnnnnnnnnnnnnnnnnnnnnnnnnnnnnnnnnnnnnnnnnnnnnnnnnnnnnnnnnnnnnnnnnnnnnnnnnnnnnnnnnnnnnnnnnnnnnnnnnnnnnnnnnnnnnnnnnnnnnnnnnnnnnnnnnnnnnnnnnnnnnnnnnnnnnnnnnnnnnnnnnnnnnnnnnnnnnnnnnnnnnnnnnnnnnnnnnnnnnnnnnnnnnnnnnnnnnnnnnnnnnnnnnnnnnnnnnnnnnnnnnnnnnnnnnnnnnnnnnnnnnnnnnnnnnnnnnnnnnnnnnnnnnnnnnnnnnnnnnnnnnnnnnnnnnnnnnnnnnnnnnnnnnnnnnnnnnnnnnnnnnnnnnnnnnnnnnnnnnnnnnnnnnnnnnnnnnnnnnnnnnnnnnnnnnnnnnnnnnnnnnnnnnnnnnnnnnnnnnnnnnnnnnnnnnnnnnnnnnnnnnnnnnnnnnnnnnnnnnnnnnnnnnnnnnnnnnnnnnnnnnnnnnnnnnnnnnnnnnnnnnnnnnnnnnnnnnnnnnnnnnnnnnnnnnnnnnnnnnnnnnnnnnnnnnnnnnnnnnnnnnnnnnnnnnnnnnnnnnnnnnnnnnnnnnnnnnnnnnnnnnnnnnnnnnnnnnnnnnnnnnnnnnnnnnnnnnnnnnnnnnnnnnnnnnnnnnnnnnnnnnnnnnnnnnnnnnnnnnnnnnnnnnnnnnnnnnnnnnnnnnnnnnnnnnnnnnnnnnnnnnnnnnnnnnnnnnnnnnnnnnnnnnnnnnnnnnnnnnnnnnnnnnnnnnnnnnnnnnnnnnnnnnnnnnnnnnnnnnnnnnnnnnnnnnnnnnnnnnnnnnnnnnnnnnnnnnnnnnnnnnnnnnnnnnnnnnnnnnnnnnnnnnnnnnnnnnnnnnnnnnnnnnnnnnnnnnnnnnnnnnnnnnnnnnnnnnnnnnnnnnnnnnnnnnnnnnnnnnnnnnnnnnnnnnnnnnnnnnnnnnnnnnnnnnnnnnnnnnnnnnnnnnnnnnnnnnnnnnnnnnnnnnnnnnnnnnnnnnnnnnnnnnnnnnnnnnnnnnnnnnnnnnnnnnnnnnnnnnnnnnnnnnnnnnnnnnnnnnnnnnnnnnnnnnnnnnnnnnnnnnnnnnnnnnnnnnnnnnnnnnnnnnnnnnnnnnnnnnnnnnnnnnnnnnnnnnnnnnnnnnnnnnnnnnnnnnnnnnnnnnnnnnnnnnnnnnnnnnnnnnnnnnnnnnnnnnnnnnnnnnnnnnnnnnnnnnnnnnnnnnnnnnnnnnnnnnnnnnnnnnnnnnnnnnnnnnnnnnnnnnnnnnnnnnnnnnnnnnnnnnnnnnnnnnnnnnnnnnnnnnnnnnnnnnnnnnnnnnnnnnnnnnnnnnnnnnnaaaagcaccagctgggcgtggtggctcacgcctgtaatcccagcactttgggaggccgaggcgggtggatcacctgaggtcaggagttcaagaccagcctgactaatatggtgaaaccccatctctactaaaaatacaaaaaaaggaaaaaattagccgggcatggtggtgtgtgcctgtagtccccaactactcgggaggctgagacaggagaattgcttgaacccaggaggttgaggatgcagtgagccgagatcgcgccattgcactccagcctgggtgatagagcgagattctgtctcaaaaaaaaaaaaaagaaagaaaagagaaaagcatatcacagcagaagactatattcaaaccatttatatgaagctcaaaaatgaagcaaagttaagaaaaatgtagggatgtatgggtagtgaaagttaggttggtgggctttcctgggtattttatgcttcataaattaacttttatgtatgtagcttttacatacattatatatatgaatttgcatgtattcagtattatgtaatacattaaaaacaatgttcgcaatgctaaaaatatattgttgaagattctgtgtgaaagctatactgtagttgtggctttttataaccctttcaagccctctgggcagtagcagtccaccccttattgccctcagtggacttcaccttctagggactcagaatttttttttttttttttgagacggagcttcgctctttttgcccaggctggagtgcagtggcgtgatctcggctcactgcaagctccgcctccctggttcaagcaattctcctgcctcagcctcccaagtagctgggattacaggagcctgccaccacgcccagcaaattttttgtatttttagtagagacagggtttcaccatgttggccaggatggtctcgatctcttgacttgtgatccgtctcgcctcggcctcccaaagtgctgggattacaggtgtgaggcccagctgggactcagattttgctgaggaccaggacagtactgtgtgctgtgtcctggccttgcagcagtgaatgtgtctcccgtttctcaagggcaggtctctgggatgcctgactgtgtcttccttgccagtgcctggctgctgcagcctcctcaaatgtttatcaaacacaggacttgcccaccgtgggagaaagtaaggccataggtgtctcaggaacctgcccaaactcgcctggctgcacggtgacaattcaaccagctttcttacccaaggtctgttggtgaccagagaaaaccttagatgaccggctgccatgatggccttatatctgtcccttttctgccagccttgaggtagagggtgccagggaggaggactctggctctaggtgttaaagtgagagggaagtgtgaagggtatctgtatagctagacagggctcaatgccaggcagagctgtctccgcccctttgatgtctatgtctctgtccctggactgtggccagtagccagtgtggactccaacctcaccagctttaggggtgttatctgcctgggagtcactgatccttactccctcctctgacagccaccttggatggggtgaaaggaaggacagcctgccaagtatgagataaaaacgcctcataaacaagaagggatttgcaggccaggcagagagccttgtgctgcttctgagtcccaggagcatgggcgaggaggtgaggtcaggcactcagcagctgctggtcctctctgaaatctttggccagatttattgctactgcttgctaataaatggttatgcatttggttcaaaggaccaagtgtgcttacatgaaaactggctgtgttccctggcctctgtttccttagctggttggactaatttgattggttaataaatgagtccaaggtggttgggctaatttttatcttagattctatgactctataactgctactcaaaaaaagtgtacttgttcctttaatctttaatcttatttttcttgagtagtagaatacacccaatttttttcaaggggtagagaatgcattttttttttaaccttccagtttggtccctagagtaaacacagcattgctgtagtagatgtagggtactggagggagcatggaacagggaaccagaagccctggttcctaccccagctgggcatctgggccagtctcttgattcctctgtgcctcagttaccaactatataacgggcattctgccatgaataccctgcgatttggaaacctcctgtgtacgtgtgcacttgggtgcctggcattcattcctaatggcatccattcgttcacacattcatccagtactcagcagactcctgccatgggccaggcaacgtcccgggcacttggaatataatggagaacaaagcagggtgcctacttctgtggtgcttggagtcttgaggggaagagagacacggaattcgtaattacatggcagcgtgtgggtgacgtattgcagaatgagggcctagtggagctgggggaccggaaacgatgtttaggccgagacctggaataggaggagttgtcgtggggatgatgtaggaagaacgagtgtgaggaggagagcgaggggagttgaggggagggctccacaccttctaaggagtggggagagatgaggcctccaaggacagaagggccctgcaggccacgctgaggagcttggacttcatcttgtggatggtggcaggcccttgaagggttttctaatccagggagtggggtggctggatcatggcttcagaaggctctcccaggcagctggatggtgaagaccaggttggggaggtcaccaggagaatgctgccctaatccaggcagaggtgacggtagcctgggccacttcatcattatcactgaggcctctcgtggcttcctcagaccagaacgaagcccccttcttcagtggctgtgggctcaccaagtgtcttctccctcctccagaggtggcgagaggcgtgctgaccagtctgccaggagacagcgtgactctgacctgcccgggggtagagccggaagacaatgccactgttcactgggtgctcaggaagccggctgcaggctcccaccccagcagatgggctggcatgggaaggaggctgctgctgaggtcggtgcagctccacgactctggaaactattcatgctaccgggccggccgcccagctgggactgtgcacttgctggtggatggtgagttgtgcctcagaggtcccggagatagttcccgtaagaaatgaggctttgtgcattccagacagtccctgtctgagccttcaaactcccaccatttccttggcgcaagaattttggggaaggcccaccaatgtctgccatccagatgctggcaaagactgctgctgggtgggagtgggagcgtctgactggtggggaacattggctttgggagttaggacttttggtgaactggtgaatagcctggggcccggagtcaggcagcctgggtttgaatcctgctccctcacatacagcttaacttctccacccttcagtttcatctttggcaaaataaggttaattttattaccttaccttagagttgttgcaaagggggtgtatgtgaatttgcgtatgtgtgtgtgtgtatatcacacacatatgctgctaaaaagtctgcatagcccatcctaagctctcaaattagctattcttatttttttagaattagcaagttcttagctccctcatacctagataaagacttcctggaaccagtgccctgtgtgtcgagccctatgccaaggcactttcttccttgtatctcttgtaatccttcagcagccttgtcagggaaagcaggcttatcatcatttccatcatcattacattatcatcagtttattttatacatgaggaaactgaagagcagctaggacttgcccaaggccgcacagccaggtctgtgtgactccaaagccctttttttcgatcatcctctctccccttcagacaagttggtcctgaggttcttcccttcccctgtcccgggatccgtgtctcagactgaaaggaggactttggtgtcctttaatttcccagctgcgattccattcatgtgtggctgagtgtggccagggtcctgactagctccagggctggggccgaggggcccagccacgtgctcccctcaagggaggctgccctgtctgcgaggtcagtgcgccccaggatccccgcccgcctgctgacacctgcaatgctttcctttcagttccccccgaggagccccagctctcctgcttccggaagagccccctcagcaatgttgtttgtgagtggggtcctcggagcaccccatccctgacgacaaaggctgtgctcttggtgaggaagttgtaagtatcttgggctgagctatgtgcatgttggctccctccttcccgaggccccccagagaggggctggttcaggtgatttcaaaacattatcattaggaattaattccttcaggctgaggaagaggagatgagagggaactgagatttacatttgactgccccccctgagctaggcactgtgcttgtgcttggaaccttgtcctattcacttgaccttggttatcacaacagctatgggaagtgggctttatttttctcacttaacagatggagagactgaggcccagagactgattaacaggtttggttcacttagctagtaagtggctctgctgggaattcaatcccagtctgtctgatttcattcaaagtccgaagattatgggcgttgctctgaaaaacatgcaaatatccctgggagggggtgtagcacagccagaccattatcagtgtctgggcccttgtgggcgtatcaggctatttccatgataaagacacgagagagaaagcggtgatgggcgggggagagggagcttggggccgtggggggagaagtcacgcctgcctgggggctctgcatcatcaccggaagacggcttaacgtgggaagacctgggatgggttcaggcatggatgtagaggaggtggaagatgctgaaaacaaatctgcctctgcagttttgctggtctccatcccagagccacagtctcccttagtccagaggtttacaattgagtttgagctgtcagtcatcagaatatagggcaaggaggtcgcattccaagacccctagtggatgcctgaaatcgcaaatggtgctgaaccctatatatagtatgtttttctatagatatgtacttatgatagtttaatttataaattaggtgcagtaagaggttagcaataactaaaaatagcatagaacagtgataacaatatactgtaataacagttatgtgaatgtggtctctctgtttctcaaaatgtcttattactgtactcacccttcttgtgatgatatgaggttgtgaaatgcctgcatgatgggatgaagtgaggtgaatgatgtaggcattgtgactcagtgttaggctactagggctttctgaccatgtgttagaaggaggatcagctgttttgggtgactctgggtcaccgagccatgatgatggcggtggatgtcaggacgagtgatgggtagcatgcacagcgcaggaatgctgaacaaagtgatgattcatgtcctgggcgggacggtgtgaaatctcgtcacacttctcagaacagtgggcactttaaaatttctgaagtgattatttatggaatttcccatttaatatttttggaccgcagttgaccacaggtagccgaaatcttggaaagcaaaacctcagataaggcaggactactgtatcagaaagccagagcagtgacttcaatagggtggttcagctcccacttgggtctgtttccatagagttactgggctgcctggcagtcatgtttttgttctgtcctctatgatgaaaagtgcggattaccatctgtgaatgatgcagctgccattagcactgtcagctcatgccccaagcctggatagcttcacagcccagcaaaggatacaccttgtttgtacctcaaaggcttgtaccatagataggattagccaggatagagactgtggctggcagcttcccaggccagcctgtggaaagctctgtcatttctgacacttcaactgaaatacttttttttttttttttttgagatggagtttcgctctgtcgcccaggctggagtgcagtggtgggatctcggctcactgcaatctccgcctcccgggctcaagcgattctcctgcctcagcctcctgagtagctgggattacaggcgcacaccaccacgcctggctaatctttgtatttttagtagagatgaggtttcaccatgttagcggggctggtctcgaacttctgacctagggtgatccgcctgtctcggcctcccaaagtgctgggattacaggcgtgagccaccgcgcccggcttgactggaatactttccatgttgacagcgggagtgggagagagtacagtgcttgtcctcccgagcagcctcgtgcctttgcttccatctgctttgaagagtcagcatgaccactgggcgcctttgaagtgaggaaagagcaggggaagtggcttcgagagcctcaggggccccagcccccactgaggccccacccagacctcaggccactgcagggcctggaagagacaggcccctggaaagggattactgggagctctgctttttctcttgtgtgtctgctttcacacccttgcccaactgcagcactgctccctccttcttccacaggcaggggtgagctcagcctctgccttggaccaggcgcagtgctggggcagtgggaggaagcgggccaacaagactgagccccggccctctgaccccacctgggcacacacgtaaagcagtcggtgaccctgccttcgtggctgggtggaagcctgggtggtgttgggggaaggaggaaaggggctttaactcagcctggaaaggttgggtttgtcccatgtgctggattcagcaggagcccagggttcgaacccaagtcagaggtggcagactcgtcaccccagctggagggtgagtggttgacgtggcctcacatgcccacatgtgtcataagagggtgaagcctcaggtttccaggccaggtgggatggtggctgactcacctcgaatgtcttcagttacccagaattcttttctggactcacctgccagaacccctctagcactttttgtgtctctggagtggcatttctgctgggtgtctagtcatctgaggacagatcttttttgttagtgccttgaaggcagggtggggcctctcttgattcatttctatatcccctacagtgccaagagcacaggcccagcgggagaccagagctggccagccgaccattgcctgagtgactagctgagccctccagcctagctcccctcacccctcgtgccaggcgctaggctacatgtttatatatatttgtaaatccagctagtttcctcatctctagattttacatttattgctcaatttttttttttttgagatggagtctctgtcgcccaggctggagtgcagtctctgtcactgcaacatctgcctcctgggttcaagtgattcttctgcttcagcctcctgagtaactgggactacaggcatgcgccaccacgccaggctaattttttattttattttttgtatttttagtagagacagggtttcaccatattggctaggctggactcgaactcctgacnnnnnnnnnnnnnnnnnnnnnnnnnnnnnnnnnnnnnnnnnnnnnnnnnnnnnnnnnnnnnnnnnnnnnnnnnnnnnnnnnnnnnnnnnnnnnnnnnnnnnnnnnnnnnnnnnnnnnnnnnnnnnnnnnnnnnnnnnnnnnnnnnnnnnncgtgagccccgcgcccggccttatttctcagtcttaacagaaccagccacgtgtgattgttcatgcctgtaatcccagcactttgggaggctgaggcgggcagatcacctgaggtcagcagttcgagaccagcctgggcaacatggtgaaaccccatctctattaaaaatacaaaaatttgctgggcacgctcaggaggctgaggcaggagaatctcttgaacctgggagggaggcggaggttgcagtgagccgagactgcgccactgcactccagcctgggtgacacagtgagactctatcacaaaaacaaaacaaaacaaaaacttaacccctactaggtaagtagtattaatattcctattttcaaatgagaaaaggagacttagaggcacagggcttataagtctggagctgggattcaaaccccgggattccacttcccccttctgtcccgtcttgagtctgtgcgaaactgacaggcaagccctgcccttgttttgtgtctaacagtcagaacagtccggccgaagacttccaggagccgtgccagtattcccaggagtcccagaagttctcctgccagttagcagtcccggagggagacagctctttctacatagtgtccatgtgcgtcgccagtagtgtcgggagcaagttcagcaaaactcaaacctttcagggttgtggaatctgtacgtaagctctaaccccctctccagcagtttccttctcttttgatttaatactccttatcgacttctcagagtggcagggaaggggtggttgaggggtttggtgagttggtgccttttgggcgttgcttgccgggaggtgtggcaatgataaagcaggcccttgtggagctgtgcatggggagtgaacggggctgggtggggccctgcttgctgggatctcagcctacatgggcttctctacactatatttggtgctgcaaaggagtcatgctcacttttcccacagtgcagcctgatccgcctgccaacatcacagtcactgccgtggccagaaacccccgctggctcagtgtcacctggcaagacccccactcctggaactcatctttctacagactacggtttgagctcagatatcgggctgaacggtcaaagacattcacaacatggatggtaaatttatgttttacttctggtcagagaggcgcccctagatgcttaggcgtagtagaaagggtactagaggccaggcatggtggctcacgcctgtaatcccggccctttgggaggccaaggtgggcgaatcacttgaggtcaggagttcgagaccatcctggccaacatggtgaaataccgtctctactaaaattacaaaaaattagctgggtgtggtggcgcacgcctgtatcccagctattcgggggctgagacaggagaatcccttgaacctgggaggtggaggttgcggtgagcagagatcacaccactgcactccagcctgggcgacagagttagactccatgtcaaaaaaaaaaaaaaatagaaagggtactaaaaggaaaaccataggctctagttcctgcttcacaattggctaccttcgttgctttggataaatgttttaagctttctgagccttggtggtatatcatttattaaatgaaaaggataatgccaggccagtctcctcttcccgggcttgtctgtgaggagagcaatgtgggaagagatttgggctgtagacatgtcaagggttgtggcttgcaggattctatagtgcatgggtggggcagggactttctgcttcagcttccgtgggccctgagggcaaccccctctctagcagagcctctggggttgtgggagcctctagaggcctccgccagctgaagcacagggctggccaaggcaccaacccactggggtgctacctgcccagcaccatcctggatacctccccagagtcaccgtgcccccgccctcaggtcaaggacctccagcatcactgtgtcatccacgacgcctggagcggcctgaggcacgtggtgcagcttcgtgcccaggaggagttcgggcaaggcgagtggagcgagtggagcccggaggccatgggcacgccttggacaggtactgcggtgggcactgagaaaggaagggatgtttcaactgtcattgcatcaggtatccattgctatgtgacaagttgcctcaaaactagtggcttaggccaggtgttggtggctcacacctgtaatcccagcactttgggaggctgaggcgggtggattgcctgaggtcagcctggccaacatggtgaaaccctgtctctacgaaaaatacaaaaaattagctggacatggtggcaggtgcctgtaattccagctactcaggaggctgaggcaggagaatctcttgaacccaggaggcggaggttgcagtgagccgaaatcgcgccactgcactccagcctgggtgataagaacgaaactccgtctcaaaacaaacaactagtggcttaaaaacgaccatcatttatcggcttgaaatttcaaaaatacagtcagttaggcagctcttctgctggtcttgcctgaatcaggaatgcagctgccatcagattgggatggtctgagatggcctcagtcacatgtctgacgatggtgctggctggtggccgaggccctgggttctccctgtggcttctcatcctcagctgccagcccagactcagggcaggcgggtggggatcccaccacagctggagggatgcactgcagagaagttagccgtatttaatctagggctttttatttttttcaaatgttaaaggtagtaataattgccattggggattgttgaaattagagcatgaaaaattccagaaagatatgaagaataattatcaccagtacttttactccctagagaaaaccagtgagaacatgttagtatgctgctttcctttttctaggtacatgtatgtgtgtgtgtatttatatatataaatgtaatattccccatgttgtcaattacttttggaaacttattatttagtaactgcctgattaatacatatattttaaaactccatggaaatttgttgttgttgttgttgttttgtttgtttgttttgagacggagtctcactctgtcacccaggctggagtgcagtggcatgatcttggctcactgcaagctccgctttccaggttcatgccattctcctgcctcagcctgccgagcagccgggactacaggcacctgccaccacgcccagctaattttttctattttttagtagagacggggtttcaccgtgttagccaggatggtctcaatctcctgaccttgtgatccacccgcctcagcctcccaaagtgctgggattataggcatgagtcactgtgcccggtcggaaattttttttaacttaaatttttttttttttgaagacaggctttctcctcgttgcccaggatggagtacagcagtgcaatcacagctcacggcaacttctgcctcctgggttcaagcaatcctcccgcctcagcctcctaagtagctgggaccacaggcgtgtgccacaatgctaattttttaaaaatgttttgtagagacagggtttcaccatgctgcccaggctggtctcgaactcctggcctcaagtgatccaccagcctcagactcccaaagtgctgggattactggtgtgagccactgcacctgactaaactttaaatttttttttttagacggaatctcgctctgttgcccaggctggagtgcagtggcatgatattggctcactgcaagctctgcctcttgggttcacgctattctcctgcctcagcctcctgagtagctgggactacaggtgcacaccaccacgcccggctaatttttttttttttttagtagagacggggtttcactgtgttggccaggctggtcttgaactcctgacctcgtgatccacccgcctcgccctcccaaaatgctgggattacaggtgtgagccaccgcgcctggcctaaacttttaaaattttaatcaaattaatacatgcacatggcaaagaagtaataaacagcttataacactgagcagtggtcccttgtcccatgccttccatttctagtcctgctttctaaggaagctgcttgactctttctgtttctagttcctctgttggtgccctccttaactctaaacaacaagcttatatggcttttttttttccctgataaaaccacttgagacattatctatcaacaccctgctatgaaaggttaggatttagcagatctagaatgcaagaatctccctgaccacaacccagagagtggtcagccagcctctgcttaaatgcttccagagacagagagcttactaccccttgcagcaatctgttttattgttcccagtgtttttgttgtagaatggcttcatggctcactttggggtcaaatgtttctagccctgtggcgtagttgaaccaaattaatcattcttaaatacttggcagttaggaaaaaaaaaagaataagatacccatttatttgagtaagtatggataaaaaggaaaaggtagaattgacatcagtcccatcccgacccctgccactttctcccagccctggccccagggagagaaggcttttatctatgggctgcacattcttcccccagattggatggtgtggggtgatggctcttcctcctggctggctttgtactgtggggtccttgtcccttgtctttcctgtcctggggagagccagaggagtatgctggggcttagggtgtaatcctagttggatgcaataatatgaagtgccggcttccatctttgttggcactttccttgttcatcaaggacaggaggcagctttctattgggccctctcctcaaaagcttttttcctgctcagacctggacaaggagtggggcctaactactctatcttacttagggagaccattttaataaatcagtgcatccttcagggtagatcgtattgacctgtccatggttttctttgatttgtgtatactttgagccaaacacactcatttatctgaatgctgagcatcagtatggctttgggggcctttttaaggggggaaaaatcagctctaacatcgtgcagaggaataggaattccaaatataggctgatccctattttaccttttattccaaccacttagttcagatagtcacaagcagcttaaagcttgtgacaagcagcttaaaagcaatcttgcttttttataaagtttcttctaaaaattttcaaattgtaaaatgtacataagatttaccatttatattattattattattttttgagacggagtctcgctctgtcgcccaggctagagtgcagtggcgtgatctcagctcaatgcaacctctgcctcccgggttcaagcaattctcctatctcagcctcccgagtagctgggactacaggcacctgccaccatgactggctaatttttatatttttagtggagatggggtttcaccatattggtcaggctggtcttgaacccctgacctcaggtgattcacccacctcagcctcccaaagtgctgggattacaggcgtgagccaccgcgccctgcccatttatattatttttaagtgcacagctctgtggcattaagtattgttgtgcaaccatcaccactttacttctccaggacttttttcatcttgtaaaactgaaactcagaatctgttaaacagtaactttcctttcacccactccttcccccagctcgtggcaaccaccagtctacttgctttttctgtgagtttgactactctagtacttcatttgcttgcttgcttgcttgcatgcctgcctacctgcctgcctgccttcctttgtctctttctgtctctctctttttctctttttttttgagacggagtctcactctgtcacccacccaggctggagtgcactgtcgtgaccttggctcactgcaacctctgcctcccgggttcaagcaattctccagccttagcctcctgagtagctgagattacaggcgcctgccaccatgcctggctaatttttgtattttttgtagagacaaggtttcaccatgttgcccaggctgcactctaggtacttcaaataagtggaatcagagagtatttgtcctttggtgactgacttatttcacttagcataatgtcctcaaggtttattcatgtggtataacatgtgtcagactttcctccctttttaaggctgaataatattccattgtgtagagataccacattgtgttgattcattcatttgtcaggggacactgggtttgcttccccattttggttgtgcataatgctgctatgaacacgggtgtaaaatatctgtttagattcctgctttcagttcttttgtgtatatactcagaattataattgtggcattatatggtaattctatttttaaattttcatggaaatgccatgccgttttccacagtggctgcaccattttacacttacaccagagtgtataagggttccagtttctccacatccttgccaacatttgttatttttcattttgctgcaatagtcctccttatggatgtgaagtgttatctcactgtggttttgatttgcatttccctaatgattaatgtctttttttttttttttttttgagacagagtctcaccctgtcacccagtctggagtgcagtggggcgatcttggctcactgtaacctccacctcctggggttcaagtgattctcgtgcctcagcctcccgagtagttgagattggcatgcaccaccacacccagctaatttttgtatttttagcagagacggggctttgccatgttggcgaggctgctcttgaactcctgacctcaagtgatctgcccatctatgcctcccaaagtactgggattacaggcgtgagccaccacacccaggctgaggatcttttcatgtgcttcttggccattcatatatctttggagaaatatctattcaaatagaaagttctttcttatgtgaacctaactctggcctcactggcccttgctctgttctcagggataaccaatgacaaatttcctagtctgctctctctgaattcttttggagttcccagacctgcatctgcttgggctcctcttcccaggctgttacatgagatggtctgtgaattcttcacctttctggcccccttcccctgaatctggtctcatttgtggatgtccctctttaagttgctgacactctccttctattggaagatggtgtggtgggggctgtctggccagcactgggtacggtctccactttccagcctcaggtggatgtgcttctttggcatagacacagcttctgtgggagctcagatagaacagtcggtttcttctcatgtaaggagcggaagactttgagccctccaccctatgcatgtgtggtttgaggcaggggaagtcttcaaaacccagttgtgaatatatccaagaaagaaacctgctgctcccctctctgctgagggaagagcaagaggaacttggatgattttgacgcaagagggggattcaggttggaaattggcgggcagttctgaaaaataaggggaaggttagagcactaggtgaggtgtgtgttatggaccacggttatttggctgttagggacgcatcagtgtactaaacactgtatcaccgtgtggggtgagcttacccaccccaaggaccttcagctctcaaggcccagacagacaggatgcacctgcctcccagactaggtgtgggagtggtggcctttgggagacacagaggtcctgggaagcacctgggagtcaggttgtatgacactggtaaagttagttcagctctcagagcctcagtcttgtcatcggtaaagtagagatgatagcaccaatcttgttcctttcagagagtttttgtgagtctgatgaaaaaatattctttagaaatgctaaagcatactgcatttgtaaggggatcagcaattacaggacagtgctggttcttgggaggagagtgggaccaggggcatcccagaatcactatcctggatgccatcgtgaactcactgcattggaatctggaggaggaagtagagtgggtggtttgagaaagctttcctggtggttttagtatgtgcttgagggggctggaggagggtgcgtgccccactgtagtatgtctaatacgtaatagatggtgttcacagcacgataaggccgtaagcagactgttctgttggggcagtttagagatagcaggaaaagcttcatggaggaggtgacaattgaattatgtcttgaaggatgtgtaggagggtcccagacagaaaatggggattgtaggcagagtacaaaggcacggagctgtgagcaaggggagggtggcagagagctgcttggtgaggccgacacgtgtgtgggtgggtggtctgagtgggacaggtggaggccggccttggtgggcccctgtaggagtggaagtggaatgccatagagtggggctctggagcctggacttcagcaggtgctgcccccttgaggctggggcctggccccccgcacagactgtagcccaggatagccttttgtatgaagttgggggtcccagggtcactctgtcttagccctgctttggccagcaaggccagcacggtcggcagctttctctcaagcgggagttctgaatttatcctctccctgatgggagttctccctgtcacatcaacattgagtctgggggaatcacaaaatcattttcttctttttttttttttcagagatggtatctcattctgttgcccaagccggagtgcagtggcataatcatagctcactccagccttgaactcctgcctcagcctctgagtagctaggactataggcatgcatcaagatgcccagctaattttttaaaaaatattttacagagatgaggtcaccctatgttgcacaggccttgagtgatcctcctgcctcagcctcccaaagctctgggatttatagccatgagccactgtgccaggctggagccccttttcaaagagggcgtggggcaaaatgcctgggaaaagcccattaggtataagggggttattccttgcttctcacaaataatccctttaactccctctcctattccccaagaatgggaatcacacctgttggaggaggtgataccaaaggtttgcatttgcacatgagggggtgccctgaagccaggactgggcggtcagtgcctccagctacacgttatcttctcaaactctttggccatccattctggaggagtttgttttgttcctctctgcagcactcccaagtgggacattctggggttaaagagccttggttacacatttccggagagattttgccctgttcacttatccatatggcatccctgaattccctctctgccctgttttctgcagctttctggaacattccactggggccccgcccacttccactgcatcacctgccactttgtgcagagcactggctctggagtcaggcagcattgggtctagttgctgcccttgcccttgactagcacgaccctggggaagtacctcactgagactcagtttgcttatttgtcaaatgggaataataatgcctgcctcaaaaaacccaaaccccagccttgctgggttgtgaggcttcagtgaggtgagaagcaattagcacagagcctggcacatgacaagggtgcaataaatgccagcatgactgcctttcacccgtatctcctgccaagcctgtctctcgagctttggattcatgtcttcaacttggcccagacttctggccagatcctccctcctgtgccaggtgctccgcatgacccaaaccaaacatatcacacccctcacagatctccctgccctgcttgtccaggggacaccccacccacccagctacccagccaggagcttgcacatcgcaccaaatgtctctgccttggtttgggttcttgccacatctcaatagcatctagcagtcagccattctgttgcactccactcttcgtgcccctctccacgaccctcctccctcatcctcgcattgcctatccgcctgacatccttgtgcacaactgggtgattcctaaacgttgggatttcacgggtctgtaaaatttcaaaaacaattctggggaccaattaaagttgctagctttttttttttttttttgaaacggagtttcgctcttgttgcctaggctggagtgcaatggcgtgatctcagctcaccgcaacctccacctcctgagttcaagcaattcccctgcatcagcctcctgagtagctgggattacaggcatgcgccatcatgcccggctaattttgtatttttagtagagacggggtttctccatgttggtcaggctggtcttaactcttgacctcaggtgatccacccacctcagcctcccaaagtgctgggattacaggcatgagctaccgtgcccggctggttgccagcttttaattttgctaagtaaggacataaaatgtaacaagtaagtgataaatagctattagcatttaccatcaccataatttcataaaagaaaggatgcttggtcaggcgtggtggctcaggcctataatcccagcactttacgaggctgatgggggaggattgcctgagcccaggagatagagaccagccgggcaccataaggagaccctgtctttacaaaaaaaagttaaaaaaaaattagttgggcatagcagtgcacacctgtagtcctagctaagtgggaggctgaggtggaaggatcacctgagcccagcagttggaggctgcaatgagctatgattgcactactgcactccagcctgggcaacagagggagaccctgtcttaacaacaaaaagactccttaactgccccccacacccgccccccccaaatgaggaagggtgaaacctcaaaatgaggggcgcttttggcacccagacactgtggagatttgtacacacagccttttctgtacttgtctccactaggcttctctccacagaccatcccgggtggcatttgggacccagctggaggtgagtcatttctcctcaggaggctcctcagtgaggtttatttatttgtttctacacgaatagaggagcagtgatgagctgtctgttgggtggtttaaaggctgcgaggaaaggtgtgaagtagggtccccttgctcagcacgcaggagctgcctggcgccactgagcctgtgggtcccacggtctctcctcccctcttcctgtggctttgtggttcattaccactttaaccccagaaacctgagccgccagaggttattgggcattctctgggccacaggctgtgttgggggtcaggactgagagtagaaactttcttcctgaagcatctgtcttgagtatagtatggggagcctttaaaaaaccctaatgacagctgggcgcggtggctcacacctgtaatctcagtactttgggaggctgaggcgggcggatcaccaggtcaggagatcaagaccatcctggctaacacggtgaaaccccgtctctactaaaaatacaaaaaattaggcgggtgcggtggtgggcgcctgtagtcccagctactcaggaggctgaggcaggagaatggcttgaacccaggaggcggagcttgcagtgagctgagtttgcgccacagcactccagcccaggcgacagagcgagactcggtctcaaaaaaaaaaaaaaagccctaatgactgggtcccatttccatggttctgaggcaacaagcaaggtggagccttcaaggctccagacgaagctgactctggcggggtttggaaaactgctgaactgcacgagcatccatgggcagccatattttctatttagggctgccccatcttcttcttgttttcttcttttttttttagagatgaggtctcactatgttacccaggctggtttcaaactcctggcctcatgggattctccagcctcagtctcccaaagtgctgggattacaggtgtgagtccggcctgcccccatcttctttgtcttctgattttagctttcattctagtgcctccatgccctcaggtcatcctttagataccctgggctataagtgtgtaactgtcctctgctgggctgggaagaacgcaaaggaacaataaactgggtccctcccatgaattctaggttcaattcaggtcgcacttgctgtgcggccttgaacaagtcgctttccctctccgggcctctgtttcccctctgtacaattggaagagtggatgcattcttatacttcctctggtgctgctggtgtgtggtttcccccttactggtgatggcatactccaggaattctggaaaccctccctgatgccgaagcagggtcaccctctccccgcctccttgctagtccttactcctggcccagcgaggctcgtgatttttgtttaaaccattctgtggaattttagaattcttgatggaaaaatgatgagctgacaagaaaatgttttgaaatccagagcattccactcactgcctgttacggttaaggcccaggctttcgcttggatacttagcctcctcttgccttggggtttccgcagaaacactgttcccgtgcagggggagggagccgtgagggtgcctggtccacatccctgctgctgcaatgtgtactaaacccatacaggcaaatgaatatttatttgttatatattttttattgcaaaaaggtgcatagaaggaaattgaaatagtgcttatctctggtgatgtgtatctttccattttcttcttcctgtgtgcaaatatatagtattatgatatatactgtgttacacaataatcataaaaatatatttctttagaaagtttgaatcaaaatacatagaatttttcttgtcttgcattcttcatacagcattatgtcatgtcttcaatgtttttctaaaatatttttggccagacgtggtggcacacgcctgtagtcccagatacttgggaagctgagatgggaggatcactgaagcccagaagttaaagctacagtgagccatcatcatgccactgcactccagcctggcgacggagcgagaccctgtctcaaaaaatatataataattggccaggcacggtagctcatgcctgtaatcctagcactttgggaggccaaagcggatagatcacctgaggtcaggagttcaagaccagcctggccaatatggtgaaaccctgtctctactaaaaatacaaaaattagctgggtgtggtggtgggcgcctataatcccaactacttgggaggctgaggaagaagaatcgcttgaacccagtgggtggaggttgcagtgagccgagattatgnnnnnnnnnnnnnnnnnnnnnnnnnnnnnnnnnnnnnnnnnnnnnnnnnnnnnnnnnnnnnnnnnnnnnnnnnnnnnnnnnnnnnnnnnnnnnnnnnnnnnnnnnnnnnnnnnnnnnnnnnnnnnnnnnnnnnnnnnnnnnnnnnnnnnnnnnnnnnnnnnnnnnnnnnnnnnnnnnnnnnnnnnnnnnnnnnnnnnnnnnnnnnnnnnnnnnnnnnnnnnnnnnnnnnnnnnnnnnnnnnnnnnnnnnnnnnnnnnnnnnnnnnnnnnnnnnnnnnnnnnnnnnnnnnnnnnnnnnnnnnnnnnnnnnnnnnnnnnnnnnnnnnnnnnnnnnnnnnnnnnnnnnnnnnnnnnnnnnnnnnnnnnnnnnnnnnnnnnnnnnnnnnnnnnnnnnnnnnnnnnnnnnnnnnnnnnnnnnnnnnnnnnnnnnnnnnnnnnnnnnnnnnnnnnnnnnnnnnnnnnnnnnnnnnnnnnnnnnnnnnnnnnnnnnnnnnnnnnnnnnnnnnnnnnnnnnnnnnnnnnnnnnnnnnnnnnnnnnnnnnnnnnnnnnnnnnnnnnnnnnnnnnnnnnnnnnnnnnnnnnnnnnnnnnnnnnnnnnnnnnnnnnnnnnnnnnnnnnnnnnnnnnnnnnnnnnnnnnnnnnnnnnnnnnnnnnnnnnnnnnnnnnnnnnnnnnnnnnnnnnnnnnnnnnnnnnnnnnnnnnnnnnnnnnnnnnnnnnnnnnnnnnnnnnnnnnnnnnnnnnnnnnnnnnnnnnnnnnnnnnnnnnnnnnnnnnnnnnnnnnnnnnnnnnnnnnnnnnnnnnnnnnnnnnnnnnnnnnnnnnnnnnnnnnnnnnnnnnnnnnnnnnnnnnnnnnnnnnnnnnnnnnnnnnnnnnnnnnnnnnnnnnnnnnnnnnnnnnnnnnnnnnnnnnnnnnnnnnnnnnnnnnnnnnnnnnnnnnnnnnnnnnnnnnnnnnnnnnnnnnnnnnnnnnnnnnnnnnnnnnnnnnnnnnnnnnnnnnnnnnnnnnnnnnnnnnnnnnnnnnnnnnnnnnnnnnnnnnnnnnnnnnnnnnnnnnnnnnnnnnnnnnnnnnnnnnnnnnnnnnnnnnnnnnnnnnnnnnnnnnnnnnnnnnnnnnnnnnnnnnnnnnnnnnnnnnnnnnnnnnnnnnnnnnnnnnnnnnnnnnnnnnnnnnnnnnnnnnnnnnnnnnnnnnnnnnnnnnnnnnnnnnnnnnnnnnnnnnnnnnnnnnnnnnnnnnnnnnnnnnnnnnnnnnnnnnnnnnnnnnnnnnnnnnnnnnnnnnnnnnnnnnnnnnnnnnnnnnnnnnnnnnnnnnnnnnnnnnnnnnnnnnnnnnnnnnnnnnnnnnnnnnnnnnnnnnnnnnnnnnnnnnnnnnnnnnnnnnnnnnnnnnnnnnnnnnnnnnnnnnnnnnnnnnnnnnnnnnnnnnnnnnnnnnnnnnnnnnnnnnnnnnnnnnnnnnnnnnnnnnnnnnnnnnnnnnnnnnnnnnnnnnnnnnnnnnnnnnnnnnnnnnnnnnnnnnnnnnnnnnnnnnnnnnnnnnnnnnnnnnnnnnnnnnnnnnnnnnnnnnnnnnnnnnnnnnnnnnnnnnnnnnnnnnnnnnnnnnnnnnnnnnnnnnnnnnnnnnnnnnnnnnnnnnnnnnnnnnnnnnnnnnnnnnnnnnnnnnnnnnnnnnnnnnnnnnnnnnnnnnnnnnnnnnnnnnnnnnnnnnnnnnnnnnnnnnnnnnnnnnnnnnnnnnnnnnnnnnnnnnnnnnnnnnnnnnnnnnnnnnnnnnnnnnnnnnnnnnnnnnnnnnnnnnnnnnnnnnnnnnnnnnnnnnnnnnnnnnnnnnnnnnnnnnnnnnnnnnnnnnnnnnnnnnnnnnnnnnnnnnnnnnnnnnnnnnnnnnnnnnnnnnnnnnnnnnnnnnnnnnnnnnnnnnnnnnnnnnnnnnnnnnnnnnnnnnnnnnnnnnnnnnnnnnnnnnnnnnnnnnnnnnnnnnnnnnnnnnnnnnnnnnnnnnnnnnnnnnnnnnnnnnnnnnnnnnnnnnnnnnnnnnnnnnnnnnnnnnnnnnnnnnnnnnnnnnnnnnnnnnnnnnnnnnnnnnnnnnnnnnnnnnnnnnnnnnnnnnnnnnnnnnnnnnnnnnnnnnnnnnnnnnnnnnnnnnnnnnnnnnnnnnnnnnnnnnnnnnnnnnnnnnnnnnnnnnnnnnnnnnnnnnnnnnnnnnnnnnnnnnnnnnnnnnnnnnnnnnnnnnnnnnnnnnnnnnnnnnnnnnnnnnnnnnnnnnnnnnnnnnnnnnnnnnnnnnnnnnnnnnnnnnnnnnnnnnnnnnnnnnnnnnnnnnnnnnnnnnnnnnnnnnnnnnnnncggtagtacctgcatccttgcatcggacctgtaaggacaacagctgcttcagtgtatccactgagcatcttctctgtgcagctttaagcttttggtggagaggcaggtggaaagaaagccccacctttagcaggcatggtgtggatagaaaaaatgcaaataatagtattattgatttttccactgttatgaatgaaatggagaaaggaatgctttgggtggatcagggagggctctgaggaggaggtaactcctgaactggttctgaatgatggtgcaatctgcagaaacaggctgatggtgaggaatgtctcttttaggcacttactactaataaagacgatgataatattctcttcagagattctgcaaatgcgacaagcctcccaggtaaggactgggtattttcatattcccagggtccgagggacagaagatttgtctctgcagaaagtcctttcttatttggacatgtcgtcagaggatcaatcacagatcaatcgcagaaatgttctgtgtgtgtgtgtgtgtgtgtgtgtgtgtgtgtgtgtgtgtgtgtgtgtgttggagagagtcttgctcggttgcccaggctggagtgccgtggcatgatctcggctcaccacaacctctgtctcctgagttcaagcgattctcctgcctcagcctcccaagtagctgggattacaggcgcatgccaccatgcccagctaatttttgtatttttactagagacagggtttcactatgttggccaggctggtcttgaactcctgacgttgtgatccacccacctcggcctcccaaagtgctgacattacaggcatgagccaccgtgcctggccagaaatgttcttttattactttatatgttgaactttgatattgttagctaagatataatgaggagaccgtaagaaaagtgggacaaatcacttcgagatatttgaaaagtgagatatttcacagttggcccacaatacaaatgaatgtgctgcaaacaagattattggagtctgaaatggaatacctgttgagggaaatctttattttgggagcccttgatttcaatgcttttgattccctatccctgcaagaccaggaaagcttaccagtatttgaatcaagaaagatcacaagtcctgtgtttgactaggtatatgggacttatggaatccagactccagaggttcagtagttgagcagctcccctgatgactcttgggcttcgtgaggcagtccttgccctcgttccccatccctgggtggattcctgcctgcactgatgctggctgcctctgctacaacagcccaggtacaaagccctaccatggtgcagtgcacctgtggaggacctgctaaatacctggggctgagctctgcacagttggggactcggagaggattagagccatccctgttctcaaggaggctacagtccaggctctgacaaagagtaaattggtaactgtgacaaagaccagcatgtgagatgggccaaaagggaggcacagataaagcaaagtggaatttagagatttgaaagagtatatcaagctgagcagtcacagaaagctcatggaggaagtgccatttgaaatgggctttgaatggtatgggtgggatgcaagaggttgggtgttcaaaggttgctatgggccgggcgcggtggcttacgcctgtaatcccagcactttgggaggccgaggtaggagaatcacctgaggtcaggagttcaagactagcctggccaacatggtgaaaccccatctctactaaaaatacaaaaattagccaggcgtgatggcaggtgcctataatcccagctacttgggaggctgaggcaagagaatcacttgaacctgggaggcagaggttgcagtgagctgagatcgagccactgcactctagcctgggccacagagtgagattccatgtcaaaaaaacaaaacaacaacaacaaaaacaaaagctgctatggaggaggggaacctccagtcctcttcgtccaccctcactgatgattttttttcttttttttgagacggagtctcgtcaagcgattctcctgcctcagcctcccgagtagctgagattacaggcatgcaccaccacgcctggctaattttgtatttttagtagaaacggggtttctccatgttagtcaggctggactcgaactccccacctcaggtgatctgcctgcctcggtctcccaaagtgctgggattacaggtgtgagccaccgcgcctggccagcattctcaaatttaacatgtctaaaagagaacacctgacgcctccccacctattcaacccagatctgttcttctccatcttccctatctcagtaactggtaccgcatttgctcaggtgcgggggatcgggcaggcttcctccctactcctcatcctgtgtccagtccctcagcaagcgttgtccttgtgctttgagacgtatctaggaattgaccactcctcaccatctccagtgccaacacccagtccagcccctgccgcctctcatccagcagggcttcctgggctgccaactggtctaccaacttctagtcttaacccccaaccaactcttttccaaccagcacttagagtatcccttaaaacacaaatccaagctctctctggctcagtaccatctcccccagagtaaaagtcaaagtcttgacaaagtccccagtttctacgaggagtcccagcaaagccatgtggtcccctatctttagacgttgcctctccattctccctttcctcgctctgccccagccacactgccctccttgctcctccacacatgctctacctcagggcctttgcacttgctgtgtgctctgcctggacacgcttcctctgacattcactttgccagctccttcctattactcaagtctctgctcagatgcacccttctccgggaggcttttcctgataatttttttaaaaaacatttgtttggccgggcgcggtggctcacgcctgtaatcccagcactttgggagccgaggcaggtggatcacgaggtcaggagatcaggaccatcctggctaacacggtgaaaccccgtctctactaaaaatacaaaaaattagccgggtgtggtggcgggtgcctgtagtcccagctcctcgggaggctgaggcaggagaatagggtgaacccgggaggcggaggttgcagtgagccgagacagcgccactgagcaagactccgtctcaaaaaaaaaaaaaattcatttgtctgtctcccttgattggatgtaagatccatttagatacatgataggcactcaaagaatatttgttggatgaaagaaggaacaaatatatggccaggcgccgtggctcatgcctgtaatcccagcactttgggaggccgaggtgggcggatcacctaaggtcaggagttggagaccagcttgggcaacatggcaaaacctcatctctacaaaaaatacaaaaattagccgggcatggtggcatgtgcctattgtcccaggtacttgggaggctgaggtaggagaattgcttgaacccgggaggcggaggctgcagtgagcggagatcacaccactgcactccagcctgggtgacaagagcgagactccatttcaaaaaaaaagaaggaacaaatagaaaagatgatgaaatgttaataaatgagcaagccaagcatactgctttcattacacagctgcatctctcaagagacatgggacatgcttggagaaacttgtctttgcagccagcgcccgctcaccagtctgggctctctgcgctgcctgactctagtaggcatctgaagtgatggctggcaggcagcctcttcgtcagcagtggattgcattttgggtagaagagcctgaatgctgggtccatacaactgtgactgcattcccagcagaaggagatggttttgtttagatgtgccctctgtctagtccagggactctggcagtggtaggaagagcctttctgtgggaagacatggctgcttgcaaagctggtttgttctttccttcattcaaagaaatattttggcgatcctactttgtattcggcactgtgtaagctgctggcagtgttacagtgaaaaagacacatgtggtccctgccttcagagaactcagtctagaggtggaaatggagaaatactgggaggggcacttgctcagcttggagtggggtcaattctcaaaggaaatgacatcacctcatctgagatccaaaggccaagtagggactagaccacaaaagggtgcagcaaaggtagagaaaacagacaggagagaagagggaacgtgtgtggagagccctggaggaaaaagatcatggcttgttggagaactgaatgaagttcatatggctggggcttgagtaccaaatgcagggacaggcaagagatgacacccccatggagaaaactgcttccaaacacttgatttaaagcatccaatcctctctgacattgtcctcaaaggaactgccatcaaggaggtccccaaagccttccgtttgttgtaccctctttgtgccttgtgggagcaggtggaatgtcaccagaaaagccactctgaaagtgagtaggagtctgtggctagccacaggcgctcagaaaccctgagcttgaggtgtctctcttgccaagtggtggaatcctggaatctagagtgggctttgttaagaaacaaacaaacaaacaaacaaaaaacagttaagcttgtcaaatggcctgttggttggcagagctgtttcattttctgggaggggggttggaggggaaggttccctttgaggcttttgacagcaccagctaagtggttttcttctcctcctattcctttttctccatattctcctcttcctcctctatcttcaattttttttttaacctagtgcaagattcttcttcagtaccactgcccacattcctggttgctggagggagcctggccttcggaacgctcctctgcattgccattgttctgaggtgagatgggtcccaggggatggccctgtggtgttctcatatttcttatctagctttcctttgcccattctgaaatttatggtgcatttattcattcatttatccattcatcaaatgaatgcacacaccacaacacacacaacacctactattatgccaagccgtgttttaggtgctgcaggagacaatgctgggcaggacagatacagtctcaggaagaagtcagacacgaagaggtaatcactactgtggtaagagctacaaaaagcatgccatggtgaggagaactgacctggcattaaggaggaagaggaattggtctgagaaagaagagggttctttttttttgagtcagcatctcactctgtcacccaggctggagtgctgtggtgcaatctcgcctcacaggacaacctctgcctcctaggttcaagtgatcctcccacctcagcctctggaatagctgggactgcaggtgcacaccaccctgcctagctaatttttctattttttgttgagatgaggtttcatgttgcccaggctggtctcaaactcccagggtcaagtgatccgcctgccttggcctcccaatgtgttgggattacaggtgtgaactaccatgcccggcccaaagagggttcttaggagagaagcccagcatgtaatatggttgacagcgtgtgcatgcacgtgtctgtgaagggggcgcagcacggttggggcaatatggggcaggaagagtggacaggtaggctggcaccaggtcataaaaggccttgaaagaggtgggaggattttaggccttctcttgaggctaaggagtgtctgttggagtttttttctttttctttttctttctctttcttttcttttcttttttttttttttttgagacagagtcttgctctgtcgcccaggctggagtgcagtggtgcgatctcagctcactgcaaccccaccttctgggttcacaccattctcctgcctcagcctcctgagtagctgggaccacaggtgcccgctaccatgcccggctaatattttgtgtttttagtagagacagggtttcaccgtgtcagccaggatggtctcgatctcctgacctcgtgatccgcctgcctcagcctcccaaagtgctgggattacaggcgtgagccaccgcgcccagcctggggagttttaagannnnnnnnnnnnnnnnnnnnnnnnnnnnnnnnnnnnnnnnnnnnnnnnnnnnnnnnnnnnnnnnnnnnnnnnnnnnaaatttgctgggcatggtagtgcttgactgtaatcccagctactcgggaaactgaggcaggagaatcacttgaacctgggaagcggaggttgcagtgagccaagattgcgccactgcaatccagcctgggtgacagaatgagactcatctcaaacaaagaaaaccaaaaagtcactctcaatgcagtttggagactggatggggtgagtgaaaatggatgcagtagcccagggtctgggcaagagataataataaactgttttaggatggtggcaatgggttggagagccatgaatagattcttttttttttttttttgagatggagtttcgcttttgttgcccaggctggagtgcagtggtgcaatctcagctcactgcaacttccgcctcccgggttcaagcgattcttgtgcctcagcctcctgagtagctgggattgcaggtgaatgtcactacgcccggctaattttttgtattttcagtagaaatgggatttcatcatgttggccaggctggtcttgatctcctgacctcagatgatccgcccgcctccgcctcccaaagtgctgggattacaggcgtgagccactgcacccggcctcaagatatattttagaggtagaattgacaaggcttgacaacagattagatgaggaggatgaaggagagggaggagtccgggatgaccctcccatttctggcttcagcagttgggcagatgatactgtcattcactaagactggaaacacctgaggatagacaagtctcagtgaaaagtggtgattccactttgggacccacttgagtttgagatgccccgagaacctcaagcggacacgcttggcaggcaacacagatcgtcaccagcaagtagatggcaataagagtcattgggtgggggttggggatagggctgaaccctgtggggatccaaggtgaaaagttctgtagagaaggaagtgttgggaaaggggctgagaggaaccacaagattctggtgttgtaagaacgagagggagggagtgtgcattagacactgaagaaacacagtaggtgttggaattacaacatgaatatgacctttcctcccttccgagaaccacatactcaaatgatgaaaataccatgtgaaggtattttcatggtagctaacgcctgtaatcccaacactttgggaggccgaggcaggtggatcacttcatgtcaggagttcaagaccagcctgaccaacatggtgaaactccgtctctactaaaaacacaaaaattagctgggcatagtggcacatgcctgtaatctcagctacttgggaggctgaagcaggagaattgcttgaacccaggaggcagaggttgcagtgagccaagattgcaccactgcactccagcctggacaacagagcaagactccgtctcaaaaaaaaaaaaaaaaaaaaagaaaagaaaagaagaaagaaagtaacattggagaagcaccacacagttaaatccaaggcgcccaagcaggacctccttaggaatattccatgtatcaatccaggaacttaaaggtcacctttaaatgctctgccctagtgttcttttccagccatggttaggaaatactcattcaggctgagttgcaccctggctgctgtctcatcatgcccatttcatcccaatcatcttcgctccatttggtcattggttttgtcattcatttccaagtctgcagaaaagtcagccaatagtgccttcagtgaacaagcaataatgaaatttttcggtgttcacaattttactgcaggaaccggctttttttcataagctgaaaccctaaaagatgtcaggctgggtcttctaggcagtggttaatcgcgatgatctacaagtggaggagacattgcactctgtcctttctacatgtagagagctttctacacgttagctcatcagaccctgccagtagccctgacctagcttgactaccaagtgtggtgtgggttgaaagattagcaagatgactactcaaattgggttcagggttgttttcactttttttctttttctttttctttttcttttctttttttttttttttgagacggagtctcgctttgtcgcccaggctggagtgcagtggcgcgatcttggctcactgcaacctccgcctcccgggttcacgccattctcccgcctcagcctcccgagtaggtgggactacaggcgcccaccaccacgcctggctaattttttgtatttttttttagtagagacggggtttcaccgtgttagccaggatggtttcgatctcctgacctcgtgatccacccgccttggcctcccaaagtgctgggattacaggcgtgagccaccgtgcccggccttcactttgctttttcaatgaagtagattacaagccgtctgaagggtgcgtggaagataagattcttaatgagtagaggtagctccttggaggatgcaaagcctgttatattttttggccagtgaggggccatgtcagcatccacgggttcacctcctgcctaccaaaggattccttgcctcaccctaggtataccctcctgtgttctggctctgtgtctacgttagggcttcaacagacttttctcataacccaccacaggccctatagagtagagtagatatgatatacatttgacgggaggaaactgaagctaaaagagatggtgcgataacagctagtaagaataggccaggcgcggtggctcacgcctgtgatcccagcactttgggaggccaaggcaagtggatcacctgaggtcaggagttcgagaccagcctggccaacgtggagaaaccctgtctctactaaaaatacaaaaattagctgggcatggtggtgcacacctgtaatcccagctacttgggaggctgaggtaggagaatcgcttgaacccgggaggcagaggttgcagtgagcccgagatcgcgccactgcactccagcctgggcagcagaaggagactccatctcaaaaaaaaaaaaaagatgaagaagaaggccaagaatcaaaccaaaaactcctgctatttctatagggccttaagggtcatctagtcaaactctttcattttataaatgaggaaacagcccccaaaggtaaaatgacttgcccaaggacaagcaagaacacacaccctgagagtccctgcccatggtccccacctgctattggctaagagctgggcccagctggtcccattggcccaccactggcccttaacatgcagcaccatcttggtgtgttgtaatggctaatagaggagcattaggttgggaacagacctggtttgctattctgctgatgatgcttggacactggctggttgctaaacaaccagagtccctgcaggcacagacagggccagtgccctgtgctgagaacatgccaggaatttattttctagcctagtgagtttccattttcttctgtataaggcaaatttgtttggaaagaggccagttatttcaagtgatgaagaagccttctattccccaaatcccctctgtctagcaaagagtataaacttagaaatactgtggggctctgggctgccaaaatggctgaaccatggttaccatgggatggccacatttacagtaggtgaagtgtgagaggttgacttcatcctgccagtctatactatatttttttgtatggccctaaatctttttccagcaatatcagtgatttttttctttgttttttattactcattctttttttctgaatcatagatgattttttaaaatttaaatatgctatcgaaaaggcttgccatcttacaggggccaattcctcccaccctattctctgtcccccactgattctctgtattttaggttatcaggcactgggaaaatagaattctcctagtagagaattatttttctgcatatttatctagaatgagcttacatcattaagtgaggacttcctatgtgtatgcctatgacttaaacatcatttcgttttgaatgtagtgtatcattccggtattttaaaatcagagcttttgctacctccacagctgggggacgggcagagggactttcatggtgttccgggccatggaggtggctgggtgcagtgggcactgtctgtggcctttggggtaaaaggggtggcaacttggtttctacatatctttctaaaaaagagtgagagttttgagcattttaaaaaacttcttttagctacagaatcttttctttaaatgaaactttttgaagcccaaatatgtaaaatagataaaaggtggaggtcaaggtgcaaaagaaggcagcagagagctcatctgtttcttctttctgcccaccctgtgtcctctccagcccccaggccctgctcacacccatccaggccagctctggacaccctcaggttggctggtttcaaagtcctctttgagtttagtgattttcagaaaagaattcatactcgccttagaatatttcaaaaggaaagctcacgtttctttgttacccattcagttacttcgaaaaaaaactgaggacagagattgcttccatattaggtcaacagggacttgaaaaatatatacatacacacatacatatgtatgtgatatgtgattattactggtgatttgctaaataatgacaaatggaaaaaaatatatgtcatccaaagagagccactgttaattttcaaaatgtaaatgtgattgaagtctaacaaacatacagaaaagttcccacatcatgtgtacagcgccatgaagtgtacacacccatgtcattataatgagatgcacgtggcaagtcaagatgccaagacaccaggttgcagcagagaaagaggtttaatcagagggtcaccaaaggaggagatgggaggaaacctctgtagggtccagccgtacggagcttagcgggtgttctccccgtgtgtggagacgagagattgtaataaataaagacacaagacaaagagataaagagaaagcacctgggcctgcgggaccactactatcaagatacagagactggtagtggccccgaacgtctgggctcgctgatattttttgcatacaagacaaggaggcagggtaaggaaggtaaatcttctaagtgattgacaaggtgaagcaagtcatgtgattacaggatcgggggcccttcccttttaggtagctgaagcagagagcaggcagcatatgtcagggttttcttctctgcacttataagaaagatcaaagacttttaagactttcactatttcttctactgctatctactatgagcttcgaagaggaaccaggagtgcgggaggagcatgaaagtggacaaggagcatgacccttgaagcacagcaccacagggaggggtttaggcctctggatgactgcgggcaggcctggataatatccagccttccacaagaagctggtggaggacagtgttccctgactcctccaaggaaaggagactcccttttgccggtctgctaagtaacaggtgccttcccagacactggagttactgcttgaccaaggagcgctccagcggcccttatgccggcatgacagagggttcacctcttgccttctaggtcacttctcccaatgtcccttcagcacctgaccctatacccgccggttattcctaggttatattagtaatggaacaaagagtaatattaaaagctaatgattaataatgtttataataatgattgataattgttcatgatcatctctgtatctaatttgtattatgactattcttattctattttctttattatactgaaacagtttgtgccttcagtgtcttgcctcggcacctaggtaatcctctgcccacacctcaaatccatctccccaaggaatttggggctagggttgtaaaaatgttggactgggccaaagtgtggagatggttgactggttgcagggtgtagggtgaggtcctgggacaaggagatgaagaagctgtcttctcatgccaatcccgttcctctgtgagggtcttcaaactggttgccggaattaggggtccgtaaaacatcttaagtgatccttaaacaaaagtcttaggatcctaatgtcagaaatcctatctacagaaacaacggggatgcagatggtcagtgtctagggctacgtgactttttgcaataaggaaatgggccaaagtgcagcctgattactgcttcattataactattaatatatttctgtccagaacccagcatgcaatttttgtcaaccctgtggagatggttttacaatcaacacccagatcaagaacacttaatatttagacaaatctcctgagtctttttcctctgcctagtttcttgtttgtttttacacagccatgattattctgtatcctcagctctgcatcctgcctttcacacttagcactataacacaggcattctttcacattagtacaaattcttgtaaatctcagactttttttttttttttttgagacggagtttcattcttattgcccaggctggaatgcaatggtgcgatctcagctcactgcagcctccacctcctgggttcaagcagttctcctgcctcggtctcctgagtagctgggattacaggcgcctgctaccatgcctggctaatttttgtattttttaatagaggtggggtttcacaatgttggtcaggctggtctcgaactcctgacctcgttatctgcccgcctaggcctcccaaagtgctgggattacaggcgtgagccaccgtgcctggccataaatctcactttcattagctgtagtattaggtggatataccaatttctcttaatcaacctcctattactcctaattggtggcacccaaacattaccaattatttgggtgttattttgcttttatttaattaattaattaatttatttatttattgagacacatcactctgtcacccaggctggagtgcagtggcataatctcagcacactgcaacctctgcttcctgggttcaagcaattctcctgcgtcagcctcccaagtagctgggattacaggcatgcgccacgacacccggctaattcttttttagtagagacagggttttgccacattggccaggctggtcttgaactcctgacctcaagtaatccacccaccttggcctcccaaagtgctgggattacaggcatgagccaccacacccggccttattttgcttttataaaaaacactgtgttgaacatctttgtgcataaagggttttttttttttatagctatgttctttcttttcccagaagtagaattcctgggtcagagagtctgaattctttgaaatccagagtgtaatgattctctcctcagtcctttcttacaggagaactccattcaatgactcagcatagctccagtcagcagccctgctgggctctcttcctgtgtggtgtccacatggtgaagccctaaataatattctgcagattgtttatttcatttggataccaagctaaaagccagtggcagatttggagccaactattaattatttatcataacaaggacaggaataacctgtcgatataaaaagaaacccaaggaaaatccccaaatcttgtttttgacattggtttcccctcctctttcccagcccttcctggagtaactgatcttccatggaattgagggaggccaccttgttcccactttggggttaggaggcatgtcagtcacaaagtgggaagcaagagggaggggctgaggcttggggcactggccaccctggcacagttgaagggcccctttaggaaggggacgtgactgtgtttttgaagatccatgtcaccatttcatctttctttgagctgtcaagtgacttttctcagttactgagccctggctttgggcccagagtggagcactgtgaaccaagctgtgatcagaaagatgtctatctccttcctgtgtagcattgactttcctgtcagatgagtcaaattgtgcccagtggtgcccacagttgagtctgtgggaagtcaccagcatggtgggagtggaccgagaggcgtagggagaactggggaggtcagcaacattaggagcaagaggaacaggaaggcagttgagggagcagtgggacccttttcctgctattacatggcggttgcaaattatctgcctcctgccagccttactttgaccgagaggcccattttctttccctactaaaagaatgctttctttttttattttctttccttttcttttttttttttttgagacagagtttcactcttgttgccccaggctgaagtgcaatggcacgatctcagctcactgcaacctctgcctcccgtgttcaagcgattctcctgcctcagcctcccaagtagctgggattacaggtgcctgccannnnnnnnnnnnnnnnnnnnnnnnnnnnnnnnnnnnnnnnnnnnnnnnnnnnnnnnnnnnnnnnnnnnnnnnnnnnnnnnnnnnnnnnnnnnnnnnnnnnnnnnnnnnnnnnnnnnnnnnnnnnnnnnnnnnnnnnnnnnnnnnnnnnnnnnnnnnnnnnnnnnnnnnnnnnnnnnnnnnnnnnnnnnnnnnnnnnnnnnnnnnnnnnnnnnnnnnnnnnnnnnnnnnnnnnnnnnnnnnnnnnnnnnnnnnnnnnnnnnnnnnnnnnnnnnnnnnnnnnnnnnnnnnnnnnnnnnnnnnnnnnnnnnnnnnnnnnnnnnnnnnnnnnnnnnnnnnnnnnnnnnnnnnnnnnnnnnnnnnnnnnnnnnnnnnnnnnnnnnnnnnnnnnnnnnnnnnnnnnnnnnnnnnnnnnnnnnnnnnnnnnnnnnnnnnnnnnnnnnnnnnnnnnnnnnnnnnnnnnnnnnnnnnnnnnnnnnnnnnnnnnnnnnnnnnnnnnnnnnnnnnnnnnnnnnnnnnnnnnnnnnnnnnnnnnnnnnnnnnnnnnnnnnnnnnnnnnnnnnnnnnnnnnnnnnnnnnnnnnnnnnnnnnnnnnnnnnnnnnnnnnnnnnnnnnnnnnnnnnnnnnnnnnnnnnnnnnnnnnnnnnnnnnnnnnnnnnnnnnnnnnnnnnnnnnnnnnnnnnnnnnnnnnnnnnnnnnnnnnnnnnnnnnnnnnnnnnnnnnnnnnnnnnnnnnnnnnnnnnnnnnnnnnnnnnnnnnnnnnnnnnnntgtgtttgtgtgaaggttcaagaagacgtggaagctgcgggctctgaaggaaggcaagacaagcatgcatccgccgtactctttggggcagctggtcccggagaggcctcgacccaccccagtgcttgttcctctcatctccccaccggtgtcccccagcagcctggggtctgacaatacctcgagccacaaccgaccagatgccagggacccacggagcccttatgacatcagcaatacagactacttcttccccagatagctggctgggtggcaccagcagcctggaccctgtggatgacaaaacacaaacgggctcagcaaaagatgcttctcactgccatgccagcttatctcaggggtgtgcggcctttggcttcacggaagagccttgcggaaggttctacgccaggggaaaatcagcctgctccagctgttcagctggttgaggtttcaaacctccctttccaaatgcccagcttaaaggggttagagtgaacttgggccactgtgaagagaaccatatcaagactctttggacactcacacggacactcaaaagctgggcaggttggtgggggcctcggtgtggagaagcggctggcagcccacccctcaacacctctgcacaagctgcaccctcaggcaggtgggatggatttccagccaaagcctcctccagccgccatgctcctggcccactgcatcgtttcatcttccaactcaaactcttaaaacccaagtgccttagcaaattctgtttttctaggcctggggacggcttttacttaaaccgccaaggctgggggaagaagctctctcctccctttcttccctacagttgaaaaacagctgagggtgagtgggtgaataatacagtatctcagggcctggtcgttttcaacagaattataattagttcctcattagcattttgctaaatgtgaatgatgatcctaggcatttgctgaatacagaggcaactgcattggctttgggttgcaggacctcaggtgagaagcagaggaaggagaggagaggggcacagggtctctaccatcccctgtagagtgggagctgagtgggggatcacagcctctgaaaaccaatgttctctcttctccacctcccacaaaggagagctagcagcagggagggcttctgccatttctgagatcaaaacggttttactgcagctttgtttgttgtcagctgaacctgggtaactagggaagataatattaaggaagacaatgtgaaaagaaaaatgagcctggcaagaatgcgtttaaacttggtttttaaaaaactgctgactgttttctcttgagagggtggaatatccaatattcgctgtgtcagcatagaagtaacttacttaggtgtgggggaagcaccataactttgtttagcccaaaaccaagtcaagtgaaaaaggaggaagagaaaaaatattttcctgccaggcatggtggcccacgcacttcgggaggtcgaggcaggaggatcacttgagtccagaagtttgagatcagcctgggcaatgtgataaaaccccatctctacaaaaagcataaaaattagccaagtgtggtagagtgtgcctgaagtcccagatacttggggggctgaggtgggaggatctcttgagcctgggaggtcaaggctgcagtgagccgagattgcaccactgcactccagcctgggtgacagagcaagtgagaccctgtctcaaaaaaagaaaaagaaaaagaaaaaatattttccctattagagaagagattgtggtttcattctgtattttgtttttgtcttaaaaagtggaaaaatagcctgcctcttctctactctagggaaaaaccagcgtgtgactactcccccaggtggttatggagagggtgtccggtccctgtcccagtgccgagaaggaagcctcccacgactgcccggcagggtcctagaaattccccaccctgaaagccctgagctttctgctatcaaagaggttttaaaaaaatcccatttaaaaaaaatcccttacctcggtgccttcctctttttatttagttccttgagttgattcagctctgcaagaattgaagcaggactaaatgtctagttgtaacaccatgattaaccacttcagctgacttttctgtccgagctttgaaaattcagtggtgttagtggttacccagttagctctcaagttatcagggtattccagagtggggatatgatttaaatcagccgtgtaaccatggacccaaaatttaccagaccacaaaacttttctaatactctaccctcttagaaaaaccaccaccatcaccagacaggtgcgaaaggatgaaagtgaccatgttttgtttacggttttccaggtttaagctgttactgtcttcagtaagccgtgattttcattgctgggcttgtctgtagattttagaccctattgctgcttgaggcaactcatcttaggttggcaaaaaggcaggatggccgggcgcggtggctcacgcctgtaatcctagcactttgggaggccaaggtgggaggattgcttgagctcaggagtttgagaccaacctgggtaacatagtgagacaccatctctattatgaacaataacagttaagaaaaaaaaaggcaggcaggcggttatggtggttccctcccatcccaccacataaagtttctgagacttgagaacagcaaaatgctgttaaagggaaatattaagaatgagaatctgcagtaagggtgattctgtgcccacagttcttcaattctttataccgttttacccacatgtggtgttaccaaagccgggcagaaccatgctagcggaagatgtgaaatccagatagctcattattgccaagagctaggcagctttgatctccaaattgttattgctttcatttttattgtaatggaattgctttgttttgtttttttgtttttgtattgaagagggttgttttccctttatttttcataagctaatgtaaatgaagaaaaaatgtcttctctgggctgtaggcctggctcagcgtacacaggtatacatcctaagctctctatgttctctaatctgtggtgactgaacatgtgtctcaatgcacggggcatttctacctgtgtttctgcagcacccccactgccttgagtccccagcagtgctgttatttgcctaacacctgtagccatctgccacgcagccagacgtgaaacgctgagacagagaccatttaggttaaatacgacagcttatcctgctgggtggggaaagtaaaaaatatgctggttcaaggcctaaagtaaaatgatcaataatgtttgtagcattaatgaaatattttcaagaaatgtgtccaggggtagcactggctatgttgacgaggcctttggtaactcagagagctcttggccctgatggggacttgcccttacgctttctttatcaggctctgagttcacacggagcctctggcacttccctgctgtcttgggagaaaggaaactggttgccgcggcaggttgtggaatctgttgctggaaccaggctggaagcccacctggtagtgaacagggcccagtggggcaggctgggcatgttgtggtctatgggtttgtttcctggagaatgttcaggaatgtcttcccagctgctttggtgctgagctctattatctcacagcacgtccagaaggctaacccaggtggggaggatgctgacaccagctccaggtggagttggtggtcttaatttggagatgcaggggcaacctgtgaccctttgaggcaagagccctgcacccagctgtcccgtgcagccgtgggcaggggctgcacacggaggggcaggcgggccagttcagggtccgtgccaggccctcctcagtgccctgtgaaggcctcctgtcctccgtgcggctgggcaccagcaccagggagtttctatggcaaccttagtgattattaaggaacactgtcagttttatgaacatatgctcaaatgaaattctactttaggaggaaaggattggaacagcatgtcacaaggctgttaattaacagagagaccttattggatggagatcacatctgttaaatagaatacctcaactctacgttgttttcttggagataaataatagtttcaagtttttgtttgtttgttttacctaattacctgaaagcaaataccaaaggctgatgtctgtatatggggcaaagggtcagtatatttttcagtgttttttttctaccagctattttgcatttaaagtgaacattgtgtttggaataaatactcttaaaaaatacccttgaaatgtaattattgctttgggcatctgggtcatctaaaaaaaaaaggcttgcctgattcatgaggagaaaggagtgaggaaggggggataattaagtagaaccatttttgggggggtatccccttaatgcaggattaaaggaccgctcaaaagtaggtaagttcaaggaagaagcagcaatttctcagaaggctttaattatgacagtatttcccacacgagtcctgggatttctggaaggggtgtgtgggattttgccacgcttacatcacattaccaggtggtggacaggtggggaaggaaaaggaagggccattatttgtcagaagactgtttattggacctgggagggggtgtaacactatcacaaaggccaccctgaactcttgatcatcagatagaccaaatccatcccctactgaaaaggatcttaggtaggaaaaacttgggacacagccatccacatcttccaaacagaggaaaagccatcatgcggactctttgtgggtgagagctactgtgtaaacagttcagggatggggaggcgagaactgcagggaagcctggaaattatgtaactccactcaaagctggactgagaggcgccgcctctgggcccccacctgggcagtcagaggaaagccacaggacaggtgatggtggccgccatctccttcaggacaccatgctctcctctttgaggctggtccttgtcttgcagaaagtgacacagggaccagatgtcacccaggtggccaggctgcgtgggccatggagggggcacgggagtgggcactggagccaggacgtggagggagctgcctccctttcttcatggcattgctgttaggatgacatggttacggtgctctttccagaagaacttaggagagcagatggtgatttctgtagaggatggcaaggaatatgcagttactggagcagccttctaagaaagcattttccttatttactgaggcacagggcaaccaaacctttctgaatatctgtgagaattacagggcagaggcaggaaacagtgtttgccatcctccatcctccagtagcagaggtgtgctggcgaggtgaaaggccttttaaggccaggtgcggtggctcactcctataatcctagcactttgggaggctgaggtgggtggatcacttgaggtcaggagttcgagaccagcctggccaacatggcaaaaccccgtctctactaaaaatacaaaaattagctgcatgtggtggcgggcacctgtaatcccagctattctggaggctgaggcaggagaatcgcttgaacctgggagacagaggttgcagtgagatgagatcgtgccattgcactccagcctgggcaacagagccagactctgtctcaaaaataaaaaataaaaaaaatttgcctggcatggtggcggtcacctgtgattccagctactagggaggctgaggcaggaggactgcttgaacccgggaggcggaggtttcagtgagctgagatcacaccactgcactccagcctgggtgacaaagagtgagtgagactccatctcaaaaaaaaaaacacaaaaaaaaataaaagaaaggttcaaatgcagcactgctgtaagggctggggcgagagctcagagcaactccttaggcggagtggtgagcccgcgggccacagggtgaggggcctgttgcaccatctttcaaacactacccaatctctaatgtctttatggaagttcccatcttctgcaggtgtatgtcacttaaaaaacaaaacaggccaggcgcagtggctcattcctgtaatcccagcactttgagatgctgaggtgggaggattgctcgaggccataagttcaagaccagcctggtgcacatagcatgaccctatctctaaataagaaaaaataaaaatgagaaaagaggaagaagtacatttccctatatctacaaaaaagaaaaaaaattaaccaggtgtggtggcacctgcctgtagtcccagctactcaagagggtgaggcgggaggattgcttgagcccagagttcaaggttatagtgagccataattgtgctactgcgctccaccctgggtgacagcaagaccttgtctcaaaaaagaaagaaacaagcaaacaaaacaccactagttcagccatgtcctacttcatacccagtttttgatgacaatccacaacttgaataaagttaagtttttcagtactctctctctctctctctgtgtgtgtgtgtgtgtaagcattcacactacaggtgtatgcattattaaattaagggtgttctttcttctaacttcaaattgcttaataaagctgcccaatgtcctgaaaaaaaatagctcactgcatcatgggaagctgcattttgatatgtcagtatgattttttaaagaatgaaatgtatcaagaagccaggtacagtggctcacgcctgtaatcccagcactttgggaggccaaggcgggtggatcacttgaggtcaggagttcaagaccagcctggccaacatggtgaaaccccatctctactcaaaatacaaaaattagctgggcatggtggtgggcgcctgtagtcccagctactcaggaggctgaggcatgagaatcgcttgaacctgggaggtagaggttgcagtgagcactctgtctcaaaaaaaaaaattatcagaagagcaactttattctattttggtttttaaattagtgtgctgctctataagagtttttaaatgatggagagaggtacggcatggtagagtctgttaccagagatagatgaagagagaagtaaaaagcagaggaagccagcacctgcacgcaccactcacgcaggcagcgtgttttcctgcagaacataaatgcacctcagcatgtaatgcggccagcttgttagaaccccattcctggcttcaccctcagggattccagttcaataggtctgagctgggcccctagaaagctatataagctgcccagatggttctgatgaaggtggtgatccatcctgagagtggctggaccgtgagttccacaatgaggtggatgctgggggttcctcatacttccggacctggtgggcttcagtggatcccttctgtgggtgggcctgtgcatcagaaggaggccaggtgccaacctttgacccgggcaatcacagtagcatgagtgtaagttacacaggtgatgctgctgtacagccagctttgaagatctctgtgctggggaccgcagggctagaggtaagattcacagcaacatgtttcagtgggtgttaactagaaaacaaaaatctatggcagcaaagcagtacaccaactggccttactggttacctagaagttcacaggccctttgtggtagagatatctactaaaattacctaataataatggctactggctgggcgcagtggctcacacctgtaattccagcattttgggaggccaaggcagggggatggcttgaggccaggagttcaagacgagcctggacaacatagtgagacccatctctacaaaataatttttttttttgagatggagttctgctgttgttgccaaggctggagtgcaatggcacaatctcggctcaccacaacctctgcctcccgggttcaagcgattctcctgcctcagcctcccgagtagctgggattacaggcatgtgccaccatgctcggctaattttttgtatttttagtagagacggggtttctccgtgttggtcaggctggtctcaaactcccaaccttaggtgatccgcctgtctcagcctcccaaagtgctgggattacaggtgtgagccactgagcccagctctacaaaataatttttaaaaaaccaattaaccgagcatggtggtgcatgcctgtagtcccagctacctgggaggctgaagcaggagaatccctttagcccaggagttggaggctgcagtgagccgtgatagtaccactgtactccagcccgggcaacaggttgagacgctgtgtgttggggggacaggggtcgaaggggaagaaagaaaaaaaagaatggcagctgggcgctgtggctcatgcttgtaatcccggcactttgggaggctgaagtggatggattgcttgagcccaggagttcgagaccagtctggccaacatggcaaaaccctgtctctactaaaaatacaaaaaactagctgggcatgctggcacatgcctgtagtcgtagctcctcgggaggctgaggtgggaggatcacctgagcctgggagtgtgaggctgcagtgggctgtgatcacaccactgccttccaacctgggtgacgagtgagaccctgcctcaaaaaataaaaaaaaaaaaagtaaataacggctaccatttactgcctctccaccatgtgctttataaacaggatattcttccttaatgtggctgccatgtaagtattctcacctgtttacagatgaggcaactgaggcttatattgaagatggtggtccaagatgcccacgctagttaagaggctgaactagactccaaacctgggcctgctggactggaaggctggtgctctttgcttttgccatggggctccggcccccagccactggtgactacctcatgggcttctcttaccaagccctttctcaggccaggtgccctcaccctgtgtggggtggggcctgacccactcaccccgggaggagatggacctggtatcctcatgtggtttgtcacgtttatcagtgtgagctggggctggaggctgacccatgggagtctgagcgcacatacaaaggcatggcttgggggctcccataggtgatcctaaggcagtggcagccagagatgggtctcaaaggagaggggcaaaactagttcctgacatagttaactctctctgatcagggaccaaatcaagccacttcccctccatctatacctagccacacctctgcactgcatgaatggtttggttttttcctgttggttccttggtataaactttgatgaacttcctgaaaattctcannnnnnnnnnnnnnnnnnnnnnnnnnnnnnnnnnnnnnnnnnnnnnnnnnnnnnnnnnnnnnnnnnnnnnnnnnnnnnnnnnnnnnnnnnnnnnnnnnnnnnnnnnnnnnnnnnnnnnnnnnnnnnnnnnnnnnnnnnnnnnnnnnnnnnnnnnnnnnnnnnnnnnnnnnnnnnnnnnnnnnnnnnnnnnnnnnnnnnnnnnnnnnnnnnnnnnnnnnnnnnnnnnnnnnnnnnnnnnnnnnnnnnnnnnnnnnnnnnnnnnnnnnnnnnnnnnnnnnnnnnnnnnnnnnnnnnnnnnnnnnnnnnnnnnnnnnnnnnnnnnnnnnnnnnnnnnnnnnnnnnnnnnnnnnnnnnnnnnnnnnnnnnnnnnnnnnnnnnnnnnnnnnnnnnnnnnnnnnnnnnnnnnnnnnnnnnnnnnnnnnnnnnnnnnnnnnnnnnnnnnnnnnnnnnnnnnnnnnnnnnnnnnnnnnnnnnnnnnnnnnnnnnnnnnnnnnnnnnnnnnnnnnnnnnnnnnnnnnnnnnnnnnnnnnnnnnnnnnnnnnnnnnnnnnnnnnnnnnnnnnnnnnnnnnnnnnnnnnnnnnnnnnnnnnnnnnnnnnnnnnnnnnnnnnnnnnnnnnnnnnnnnnnnnnnnnnnnnnnnnnnnnnnnnnnnnnnnnnnnnnnnnnnnnnnnnnnnnnnnnnnnnnnnnnnnnnnnnnnnnnnnnnnnnnnnnnnnnnnnnnnnnnnnnnnnnnnnnnnnnnnnnnnnnnnnnnnnnnnnnnnnnnnnnnnnnnnnnnnnnnnnnnnnnnnnnnnnnnnnnnnnnnnnnnnnnnnnnnnnnnnnnnnnnnnnnnnnnnnnnnnnnnnnnnnnnnnnnnnnnnnnnnnnnnnnnnnnnnnnnnnnnnnnnnnnnnnnnnnnnnnnnnnnnnnnnnnnnnnnnnnnnnnnnnnnnnnnnnnnnnnnnnnnnnnnnnnnnnnnnnnnnnnnnnnnnnnnnnnnnnnnnnnnnnnnnnnnnnnnnnnnnnnnnnnnnnnnnnnnnnnnnnnnnnnnnnnnnnnnnnnnnnnnnnnnnnnnnnnnnnnnnnnnnnnnnnnnnnnnnnnnnnnnnnnnnnnnnnnnnnnnnnnnnnnnnnnnnnnnnnnnnnnnnnnnnnnnnnnnnnnnnnnnnnnnnnnnnnnnnnnnnnnnnnnnnnnnnnnnnnnnnnnnnnnnnnnnnnnnnnnnnnnnnnnnnnnnnnnnnnnnnnnnnnnnnnnnnnnnnnnnnnnnnnnnnnnnnnnnnnnnnnnnnnnnnnnnnnnnnnnnnnnnnnnnnnnnnnnnnnnnnnnnnnnnnnnnnnnnnnnnnnnnnnnnnnnnnnnnnnnnnnnnnnnnnnnnnnnnnnnnnnnnnnnnnnnnnnnnnnnnnnnnnnnnnnnnnnnnnnnnnnnnnnnnnnnnnnnnnnnnnnnnnnnnnnnnnnnnnnnnnnnnnnnnnnnnnnnnnnnnnnnnnnnnnnnnnnnnnnnnnnnnnnnnnnnnnnnnnnnnnnnnnnnnnnnnnnnnnnnnnnnnnnnnnnnnnnnnnnnnnnnnnnnnnnnnnnnnnnnnnnnnnnnnnnnnnnnnnnnnnnnnnnnnnnnnnnnncggtgcagtggctcacacctacaatccttgtactttgggaggctgagtcaggatgattgcttcagcccaggagttcgagatcagcctaagcaatatagtgagaccttgtcgctacaaaaattcaaaacattagccaggtatggtggcgcacacctgtggtcccagccacttgggaagttgaggtgggagaattgcttgagcccagaaggtcaaggttgtggtgagccatgataacaccatcgcactcctgcctgggaaacagagaagaccctgtctcaaaaataaagtaaaatcaggccgagcacggtggttcatgcctgtaatcccagcactttgggaggtcgaggcaggcagatcacaaggtcaggcgtttgagatcagcctggccaacatagtgaaaccccgtctctactaaaaatacaaaaattagccaggtgtggtggtgggcacctataatcccagctactcaggaggctgaggcttggacccgggaagcagaggttgcagtgagccacgattgcatcactgcactccagcctaggcgacagagtgagactctgtctcaaaaaaaaagtaaagcaatccaaaataatccataccgtctcagaaaaaaaaaaaagtagaataaagcaatctgaaataatccacaccttttttatcttttaagtaaaatatgtttcttgccaacaacatgctggttgatagcttgatcaacaaattggcttttatgtgctcatcaagtaataatttatctttccctcaatccaa

SEQ ID NO: 143 - DNA, 3248 bp, Homo sapiens
tcaggtgcggcgctgtggcaggaagccaccccctcggtcggccggtgcgcggggctgttgcgccatccgctccggctttcgtaaccgcaccctgggacggcccagagacgctccagcgcgagttcctcaaatgttttcctgcgttgccaggaccgtccgccgctctgagtcatgtgcgagtgggaagtcgcactgacactgagccggaccagagggagaggagccgagcgcggcgcggggccgagggactcgcagtgtgtgtagagagccgggctcctgcggatgggggctgcccccggggcctgagcccgcctgcccgcccaccgccccgccccgcccctgccacccctgccgcccggttcccattagcctgtccgcctctgcgggaccatggagtggtagccgaggaggaagcatgctggccgtcggctgcgcgctgctggctgccctgctggccgcgccgggagcggcgctggccccaaggcgctgccctgcgcaggaggtggcgagaggcgtgctgaccagtctgccaggagacagcgtgactctgacctgcccgggggtagagccggaagacaatgccactgttcactgggtgctcaggaagccggctgcaggctcccaccccagcagatgggctggcatgggaaggaggctgctgctgaggtcggtgcagctccacgactctggaaactattcatgctaccgggccggccgcccagctgggactgtgcacttgctggtggatgttccccccgaggagccccagctctcctgcttccggaagagccccctcagcaatgttgtttgtgagtggggtcctcggagcaccccatccctgacgacaaaggctgtgctcttggtgaggaagtttcagaacagtccggccgaagacttccaggagccgtgccagtattcccaggagtcccagaagttctcctgccagttagcagtcccggagggagacagctctttctacatagtgtccatgtgcgtcgccagtagtgtcgggagcaagttcagcaaaactcaaacctttcagggttgtggaatcttgcagcctgatccgcctgccaacatcacagtcactgccgtggccagaaacccccgctggctcagtgtcacctggcaagacccccactcctggaactcatctttctacagactacggtttgagctcagatatcgggctgaacggtcaaagacattcacaacatggatggtcaaggacctccagcatcactgtgtcatccacgacgcctggagcggcctgaggcacgtggtgcagcttcgtgcccaggaggagttcgggcaaggcgagtggagcgagtggagcccggaggccatgggcacgccttggacagaggcacttactactaataaagacgatgataatattctcttcagagattctgcaaatgcgacaagcctcccagtgcaagattcttcttcagtaccactgcccacattcctggttgctggagggagcctggccttcggaacgctcctctgcattgccattgttctgaggttcaagaagacgtggaagctgcgggctctgaaggaaggcaagacaagcatgcatccgccgtactctttggggcagctggtcccggagaggcctcgacccaccccagtgcttgttcctctcatctccccaccggtgtcccccagcagcctggggtctgacaatacctcgagccacaaccgaccagatgccagggacccacggagcccttatgacatcagcaatacagactacttcttccccagatagctggctgggtggcaccagcagcctggaccctgtggatgacaaaacacaaacgggctcagcaaaagatgcttctcactgccatgccagcttatctcaggggtgtgcggcctttggcttcacggaagagccttgcggaaggttctacgccaggggaaaatcagcctgctccagctgttcagctggttgaggtttcaaacctccctttccaaatgcccagcttaaaggggttagagtgaacttgggccactgtgaagagaaccatatcaagactctttggacactcacacggacactcaaaagctgggcaggttggtgggggcctcggtgtggagaagcggctggcagcccacccctcaacacctctgcacaagctgcaccctcaggcaggtgggatggatttccagccaaagcctcctccagccgccatgctcctggcccactgcatcgtttcatcttccaactcaaactcttaaaacccaagtgccttagcaaattctgtttttctaggcctggggacggcttttacttaaaccgccaaggctgggggaagaagctctctcctccctttcttccctacagttgaaaaacagctgagggtgagtgggtgaataatacagtatctcagggcctggtcgttttcaacagaattataattagttcctcattagcattttgctaaatgtgaatgatgatcctaggcatttgctgaatacagaggcaactgcattggctttgggttgcaggacctcaggtgagaagcagaggaaggagaggagaggggcacagggtctctaccatcccctgtagagtgggagctgagtgggggatcacagcctctgaaaaccaatgttctctcttctccacctcccacaaaggagagctagcagcagggagggcttctgccatttctgagatcaaaacggttttactgcagctttgtttgttgtcagctgaacctgggtaactagggaagataatattaaggaagacaatgtgaaaagaaaaatgagcctggcaagaatgcgtttaaacttggtttttaaaaaactgctgactgttttctcttgagagggtggaatatccaatattcgctgtgtcagcatagaagtaacttacttaggtgtgggggaagcaccataactttgtttagcccaaaaccaagtcaagtgaaaaaggaggaagagaaaaaatattttcctgccaggcatggtggcccacgcacttcgggaggtcgaggcaggaggatcacttgagtccagaagtttgagatcagcctgggcaatgtgataaaaccccatctctacaaaaagcataaaaattagccaagtgtggtagagtgtgcctgaagtcccagatacttggggggctgaggtgggaggatctcttgagcctgggaggtcaaggctgcagtgagccgagattgcaccactgcactccagcctgggtgacagagcaagtgagaccctgtctc

SEQ ID NO: 144 - protein, 453 aa, Homo sapiens
MLAVGCALLAALLAAPGAALAPRRCPAQEVARGVLTSLPGDSVTLTCPGVEPEDNATVHWVLRKPAAGSHPSRWAGMGRRLLLRSVQLHDSGNYSCYRAGRPAGTVHLLVDVPPEEPQLSCFRKSPLSNVVCEWGPRSTPSLTTKAVLLVRKFQNSPAEDFQEPCQYSQESQKFSCQLAVPEGDSSFYIVSMCVASSVGSKFSKTQTFQGCGILQPDPPANITVTAVARNPRWLSVTWQDPHSWNSSFYRLRFELRYRAERSKTFTTWMVKDLQHHCVIHDAWSGLRHVVQLRAQEEFGQGEWSEWSPEAMGTPWTEALTTNKDDDNILFRDSANATSLPVQDSSSVPLPTFLVAGGSLAFGTLLCIAIVLRFKKTWKLRALKEGKTSMHPPYSLGQLVPERPRPTPVLVPLISPPVSPSSLGSDNTSSHNRPDARDPRSPYDISNTDYFFPR

SEQ ID NO: 145 - DNA, 47971 bp, Mus musculus
  misc_feature (1)...(47971): n = A,T,C or G
cccaaagagaagggtctcatcaaaaaatgtttatggttttatagggtgcttttagttgagtgagaatgtgacagaagagtgttaaagcacaacaacaacaataaaacctatcacaggcaaaaaggaactatagtaagtaaaattttaccaggggatctctggccaataggattacaggaggctgtggtcaagctgagacaagctctggggccagcagtcttttgataaatatagaattctcactttccatttcccaaagggcttcagtcccacacaagacatccattttggtgtcttaggtgactcattttagggcttgaccaaactggtaagaccatgctcctggcttagcggtatctctcccatttctctgaggctttgcaaactgtctatttactcatcagctatgccaaccttttataagctgaagaatgaaagggctacctgggaaagtgactttatagaacaagaaaaaagatgtgtggagctggatcaaccactgtgtactaggtttaaatctatttctgtttattctaggtccccagaaagaggtagtaagaagtggtacgtgacattcagacaaggaaactcttgattttcctatgacacataggaaactatgtgtttcaggaaaggaaaaattggacatgaatccaagacattatttgtagtcttgcctaagtgcaagagttatgggctttttctagaacattattcataaaaagcaatatctaatcattacaaacactttggataaaatgcaataaaaagagaagccatgagtacacttggtgaaactgcagcttgagggttagccaacaacaggataaaagaaccagaagggaatgagatggggaaggcagaaggggaagaaagaacacaggagcacaggaggtgagagggaaaaggaaaattacatctctgtggttcaactagagagaggggagtgggggaagctttggcttagatatgtggtctaggtgcgatgatttcccaacagggtgtggaacacttcaaattaacaaaagaaaagtttgggaacattccaaaatatgtataaaagtcaaggacccactctgttcctggaggtatcccagggattccctggtccatagcattcacatctgaaccatactaaaagtaaaaacggtcatcgtactagaaagaaagcaacccagatttgagtgactgactgcctccccaactcaaaggttacaagaccctgtcccacttcaggctctgatcaaatgtgtgctttcaaatggaaggagtagaggggaactcgagcacaggcagtccctaattacccaccattttctatcactttatcaaggcaagatttctcagtaaggcactccacccaggttttccaatttgagccccccccccatgtggatgctatagctctgtaatacacaaatatcaagatatgcactcttactcatgtccagcccaccagtgcaccctgcattccatagctgaaagcacaatattggaaaggcaaagttagaccaggatgttttgttctcagtaaaaataattactgtgcaaaatgcactggtgtgatctgttgtggttcgcttgtttctccccaacttgtctgttcccaagtgaaaactggtgcccctgagcagctactgcagccaaccaagggtttactgggttgccctaaccatctggagataaattgattttttttacttcaaagccatgactgctgagcgcacatatttcctagaaattgaaagaagaaaacttagcccactttgaagagaaaaatgtcacttcctgattctgcctgcattcaaaaacatttctgtaggacatgggtgtctcctctcacctcccataattctccacacatccagtaaaatatgcaggccagattgcttacatgaaatactttatcagtgagttcataaagatctacttttcaaaaacaaaacaatacaaagatttctactaaatatacttgtgatcctagcactcaggtacctgaggcaggaggatgatgagtttgaggtcagcctaaactacaaaataaataagtgaatcctgcctttaaaataatataaataaatacatttaaagataaataaacaaggaacaatcctcagactctgagatttcaaaatatacttagctccgcccttgccaccttctcacttcctcctctctagaaaggacactgctatatccagactcgttctacagtagttatcaggcatccattctcaggggagtgtgatagtttctgtctgttctatttaaaagacactaagggagttgttgtaaaattagcaaaacagtgaacacagatattcatgagtgaatgacccaaaattggagttcacaaaatgctgacaagttgccaaatacataaagtgatcattggtaaccagaggaagaatcaggctacaaacctaaggagggaggtgtattgttaattggaagtaaaggtggagaatatcggagcagcaacttaaaatatgtacacacaaataacattatatggactgagcagattatatctctgtatttaggaagtgtgtgtgtgtgtgtgtgtgtgtgtgtgtgtgtgtgtgtgtgtgtgcatgcacatgagcatgagtgtgtctgtgtgtgtggtgtgtgtttaacaatcaaaggaaaaggccacagggttggaaagattttctagtgtttaaaagcacttgatgctcttgcagaggtcctggtttcaatttccagcagtcacttgttggtttatgaccatctgcaattccagtctgagtcaatctgatgcatcttctaacctcctcaggtaccagttatgtatgtagtgcaaagacatgggttcaggtaaaacacttatacacacaagtaataaaattaacacattaattttttaaagaagccatgcatttgaatgaaagctttaaaaaaattaggttaaaaaatgtgaactgcaagagatgcaaaaaagagcctctaattttgcaagaaggatactggtcttacaaaaaaatgagtcagaagaggttattaggtatggttagaataaaacaatgcatctgtagtaagggaagaattcagtagcatcagaggctgaaagtgagacttaaagggaggtaagagaaacctttcagatgatacagccaggatactgcaagcaacatcagacgctgacagatttcaatccagaaggggaagggagttgagaggcttactaagagttggtaatggattccttcttattgaactagtacagaagccaaaagggataacaacttttcccacaaaggatggtgcgtccgcatgagttccccatgtgtgcacacagcattctgaatcaacagttaggagtaccatcttgtgacagccacttctttaaatgagctttataccagcctgtccataaatgcaatgcaataaaggataatgtttgcctctcgcattgttaccttgatgatgagatgatgcttgcctcgctcgttgttaccttgatagtgtcctgcacatagactctccatgctcagtgatgattcctctccatgtaccatgacttatcatcatgggagaccctttcctcagctcagcacatgagtgcagtgtcaacagctttctgaaggacagtttcaaccatttgagttttccaaccctaccctggaagaggttggggcatgaatacatatttagtctcttccttctatacttggctttcccacttttatcgttaattctgtgtcactgaaaattaaagtatatttctttcttttttatggttttagcgctttattatagaaaaggagagagagagagagagagagagagagaagcaaagggcagccatgaccatgtggagagaggggggaagggaaaggaagaaggaagaagagaggtgagagtaagagagacaagagcttaggagagacaagagcagtatatctctattgatgcaagttctcactaaatactctagacttgccccaaactcagggtccacctgacattgtcttccaggtgctaagattgcaggcatgccctgtcagcacaggctgaaactatatttgttttttttaacatttcagtatttccacttgttaaggttggctgatatcctaattctccagaatggcatgctttcaacaatcctcagtcatttcaaaatgttatatatttcaaagtgtctttacagcaatcaaattgtgcatttctatttttgagttcctctgctctcatgagcaaaaagagtgatgagatctaatatgcttccttctttgccatgatgaccgggacacctgtagatatatctgtcatactcaaatacatttctcaatacattaaccttactctttccattcagatctctggctttatgttaatagtttccatgattacctgtaaatttattttaaattgtcttaaaactcccacatgcaatttaaaaataaaaatgtatgaattactgagagcatctttgtatttatcttcaaatttttctctacccaacctttttctcagatgctacattctttacaacagtcagccttcataatatacctaccacatagctcaaagaaaatctttttagatgaaagcatagattagcaagaaaagcattcacaaggattttataaaggaagcttcaacctttctctgttattcccccaagtcttcttgattattttgccttgatttcattttagtattctaaatcatgtatcagaaaagtctaaaaggatgataaactctataataaaagagtttaagactctatatgcagtaaaaaaattttagattgtataaactataatgtccttattgaagctactcatctctaccattatagaaacatccacagaaagtggataagcaaatgttcatgattatttcaataaaatattattgactaaaacaggagattgccagatttgaccatgggccatatttcagtgatcttgcttcaaatctatcactcttttactgtgtcctctgaataaatgtcgcattgtgactgaagtctaatgtccaagttcattggacaacattgaaggctcttgggttaaggggacaaacagtccctcctcaaaaggtagtttagctctgtgctttgttacttaaaacataccctatgtgagtttgttccctctcaaatataccacattaaaaaacaactttttattacacagtcttgaagtgtggacactatgcccctccttagaattgggaacaaaacacccatggaaggagttacagagacaaagtttggagctgagatgaaaggatggaccatgtagagactgccatatccagggatccaccccataatcagcatccaaacgctgacaccattgcataccctagcaagattttattgaaaggacccagatgtagctatctcttgtgagactatgccggggcctagcaaacccagaagtggatgctcacagtcagctaatggatggatcacagggctcccaatggaggagcaagagaaagtacccaaggagctaaagggaactgcaaccctataggtggaacaacattatgaactaaccagtaccccggagctcttgactctagctgcatatgtaacaatagatggcctaatcggccatcactggaaagagaggcccattggacacgtaaactttgtatgccccagtacaggggaatgccagggccaaaaagggggagtgggtgggtaggggagtgggggtggatgggtatgggggacttttggtatagcattggaaatgtaaatgagctaaatacctaataaaaaatggaaaaaaaaattcagtctactctataagatccataaaaaaaaaaaaacaactttttattacacagtcttaattcaagagaactatagatactaaatcttcttcattttattctagagatatctgcatcctcataaccaatagtaactttagattccacagttgtaactgagcttaaatagatggctcaaccaaagcaccagaaaaatagtgctcaaaccagcacttcccaacaacacgatgctagagactgcgatgctagagactgcgtgattcctcttcacttttcacatccacatagtacaacagtagtattctcatccaaggatatcttggatgctctttcttagtcattctaccactgtttgtcaaatgctcccaggatagtctgaagtacttttccaaacatgggtttcctgatgtcaacctgagtatctgcttcagtagccctttaaggtttttaagttaagtcttctagtgatgttaatgctgatggtgctgagtcagagaccatcccctaaaagctcctactttgtatgataaattcccaaagcccatactattaggaagtaatgaaaggtaggaaaactacagctgtgttgtctctatttcaaaatagattttactcatcaaaggatgagagattagcttggtttaatacactgtcaggtacaggaaccacatcttagcaactaatgttactttaaaggacaccaatggacaatctcactaggacatgctagagtggaaatatagtcaggtaaatataggaaatatagttctgctagtcaggtaagtaaggaagatagaaatataggaaaagtaaaggaggcagaaatccaccacacaattcttttgtgtacccagccctctagaactctcttgctccgtagccacaaagtcaagatgatcaatgactgagggttggtcatttatgggcctagatctaaatcatgcagataggatgcaaagatgaagagagcaagaacaaatggagtggctctgggactctagcatctcacaaggtaggcaaaattgacatgtgctcacacacttgtcaataagtagattcaggcaggtaattacatcactaggtgacgtggcctggaatctagagagtgtgttagtgggttgctatatagaggcaggttttactaaggagatggagccagatggcccctgttcagaaagatttgaaagacagacagaggcatagcaaggtaagagaaacattcaaggaagcctgaatgggttcagcatattttctgcaaagacatctggagaacagacagagggaagaagaagcctgtttctttcccttcccttgtgaaccaaatcatttcatttcgatctcaagaaaggggtgtgtgtgtgtgtgtgtgtgtgtgtgtgtgtgtgcactcgcgtacaagcacgcacccattgacttccagtgtcatccctcaagatccactgcccttgctttttgagatggagtctctcagtaatcctgaaactcgctgattaagctaggttaactggtcagcaaatctacctgtctttgtctccataacactgggattataagagcatgccactgcacccagcatttatatgtgggttttgaatagcacacttcggtcctcaggcttgatcactgagtgagttctcaaacccttcaggtcatgtcatctcagtgtctccatctccttccttgtgaaataaataatttgagctaaataatcacaagactccatatttcatgtatcatgtactgactctgggtcttataaagtgagcaatcagctaggctcagcctttctacctgaccttcctctgctccggccaagttctgctttttttttttttttttttaacatttcctgtgcagttttacctccaagaaggatttgaaaataactcagcaaggaacctgtaggatcctgccacatgcaccttgtgtggcttaggtagaaattgaaaagagcctgttatcacagggagttgactgctaggttgcctggaccagatcttgcaacacatgaaaagcatagaggaggtgaagacaacaggagtagggaatagggtgcctctgaaatttcactagcagaggatgcaaccacaaaagaagtgaagttgggcccacaaactgttagtgactgatctgaaaatctcaactgttcagaaggttctaagaacaaagggtgattttcccccttgtcagccctccctcctaggacaatgtacaatatgcaaaactgtaagtataagacaaacatttttttccactgcctcctcagccccatgggccttcaggaagacctgaactttaaacgaagcctttttatttttcaacacccacagcttccattcagcaatcagaagttttccacttcgatcaaaggggctaaacagagagggccaagggagcagccggttctcagcagctctgggcagattgccacccactccctgtccgtacctaccaaaggacaaggctttctccccaaatcaaacaagtgtacccccccaaaacactaacttgccttgccctatctaaaccagcaggacaagtggctaaggacaaatctgtcttccaaaccccaggctcagtttccttgacaaccagatggagacactgccctcgaagaagatactcaccagttcattcctcactacctatccctcctctgtggtttttcattttataaactcaccaaaaagggcctctagaccatctcctaagtctaagctgccttgcagaatgctcaaagagagatctacacagatccagaaagctaaataatctgagctgggctttggatccggcatttctttggggcttctgacatgtcctgtgacctgcagaggtagtgtatagtcaaaagagaaggtgctgtctacctcaagggaaatagcaagtgaggtttcagaaggccacatctggaggcagctctgaagcttttagagaatattctgaaagaaaggtcattcatagcaacagatacgatccagctctgtgtcccagaaatctatttattatatgaaattccagacatggcccagagggcaacttgggctgtttaacaggaattgttcaacaacagctgccaagtccattcccattcaggaagccctcttacatcatcctgtttgatcttccccatgactgcaaagcagactggggtgaaagcaggggctgcgttgacttattcaaggagcaatgctgagaagaggaaaggctaagatgcaacctgaggttttcagcctgtaaggaaagggtcccggcaggcttttggagccaggctggtttgcatataccaccaagttttaccattagattaacactggtagatttgattaagaatgcttttatgctgggtctcagttctctatgctgtgaagaagaaatactacttgcctctgaggctggtgacgagtgtgaagtcagcctctaagccaagttcccaagactgtacctgagccagaatgttcaattctagtaacctctgtccacaaactcatcacaaacacctggaacactatttgcacccccatacaacccacagacacttcacacactcgttccacagcactgagcctccccttcctgaccccctcactaatttcttcccctagtatgaactttagggcaagccagtttcatcggcaaatttaacagccctggagagcaccctgcaagagatagaggagctttggttcaacagcaaattatttccaaattcctcttctctcaccatgtctttgaaactatcctcaaatatcctactgccacaaccttgtctccaggtaggtaaatgcccaaacagtgggctcttctttcccagaaatgggtatgtttccagtttagagcatgctgtaattgttggacaaccccaacagtcattgtgctgctgacaaaggactgccatctccagggacccagcaaagagactaatctggaagcttcctgggccaccagcatggatcatgcagtgtgcagggtccccgcggcaaggcgttctgtggctgagcctaaaggaaacagaagtggttggtgtacactcacgcggaactgtctccttcctaccacccgctgacatcaaccatcgtctatctcgctacaatttctctgcactcagattaatcccaggcgatgaaaaatgaacctctcccccacccttgcagccacccttcgcctcacgcccccagagaagagtttctccatccggcaactggtgaaggcttttttccaagtcacatgatccaggatgcaggggaaaatccttcttggaacagagctgggtacagaaccgaatcagatgaggagagataaggtgtgatgtgggacagactatataaagcatggagccagggctgcaacaagcaggcagctgtggggctccttcccctgacccagccatgcaggtgcagcccggctcggtagccagcccctggagaagcacgaggccctggagaagcacaagtcgcagctacttctacctcagcaccaccgcactggtgtgccttgttgtggcagtggcgatcattctggtactggtagtccagaaaaaggtgagtaaacatcttttttctgcttttctttcctcatttataatgtgtgtcctctagaggaacagctctgggaagctaatgaatagtttaactaggagcaaaaaaaaaaaaaaaaaaaaaaaaaattttaaaaagtgaaaataagtaaaactatgcatatatagagagagattatatcagagaaaaggggaaaaactagaaatgaactttctgcactcagtgggaattttttaaaagaaatagaactggacatgagctcaaaaatttccagatgtactggagccaacagaagagctgctgaccttgagaagttaagattgaagcccagatgggtcacagcctcacagtatggagggaggaagcatagggagccctgatggcgagtgcgcatgtgggtatcacctctgtaaggcgctcatcctaattctaaggttatgtcctcaatccgtgctcccaggacttctgaggcctctcttttgccgagagtctgttgttgctattgtttgtttgtttgttgtggttgttttcttgcttgcttgcttgtttttagtgaggagctactttttaaagactgtgatatttgagagagagagagagagagagagagagagagagagagggagagagagagggagagggagagagagagagagagagagagagagagagagagagagagagagagaggccaagtcttcccagagctctgctatttcaatgttaaaacccacaaaagaaatcgaaagcttcctcacaagccactggctttgaagagttcagggtgttgaaaagtagcagtgtttttgtcacctgtaccctctgagatgcacacataatgtgcagggccacaccatcttgggaaatttcgtttgtttgaaatgggggtagggggagaaagtcaaaccgtagcttagaaaagtatccttgagagagaactcttacacactgtctggaaaggactgcgtggtcagctcacatgactcacaggcttggggtgagatccaggcatggtgatttggatactgtatgaataccactggtgcaacaccctgcccaagtgtgaactcacctaatttataattcttccaagttgccttggaccacagactctgcagcatactagttgctgaaagctagggccttacaagtatcagcaagtatggatattgaaataaagctttaaagctccttcctccttggcagtgtaagaagggagttattcacacttggcctgcagagctgatgggacacatcagttcatggatcgtttgcatcaggccaagaaggactcgcagacaaacctctgggcactttctcttctctccacattctctactttctgtcactctgattttccatacaccagatgtatattgttttgcagtaatggccaggcaagagagattagagtagcctgaagacatttgtcattcagaggacacaggcagaactgctgggtgtggggaagaagccaaggtggggaaggctgatggtggcactgtgcagaagcagctcccatccactgttgaaatgattcctcctgtgaaatctgcacaggcttctgccctgtttctgcagaggcacaaaatgaagcacagacaggggacagggcttacagtcaagcaccctgagcaagtggtacagtaggggctgcttagtggctcttggttgctctgtgagaatgctgttccctttgcttgccctgatggtggcagaaacattctcattcttctctcagagatttttcctcttgtgtctgttgatctgacttacctccgtgcctgggtatagaacggtgcacagtctgtgtgtaagctctagtatgctgtgatttttttttacgtgtcagatacttgctcacaagctagggctttccattttaatggctatgctattaagaatctaacgcttttcgcatatcgtttctagtacattatcaggcattaactgtggcaagaactggggaaaaatgagtcccctgggcctgggttattaagagtacatcccataggaaggcagatggggactgttacaaacaggtgaacttagcaactggagagactcagtaggaatctgtcaaagaacccaatgaaaagatccaaagagctcagactcgcattctagtattaaatatggaatgggcaatgaacacatggtgtcctccttgtaccacagggactgtgtggggaactgtgaggtttaccttactgccctatgtaggaccacctcgagaccacctgtgaagcagtagttccccagcagactgcaagaaaacatcactggaaactacagtatctggtcagagtgagaaatatgaataactttcaaggaatggaagagatgagaatagaggccccacctgcaccactgcagagatgagaaaagagatggagaagggagagttagccatgtcaggaaagtgagctgggatccttgagattttgctagaggaagaaatcgctatagtggagacaaaggggaaactgaggcatcaactcagtatttactgagtatctatttgtactgggcactgttatagacactgggtacgtaaacctaaccaaaaccttgaggcaaatccactccctgcccttgaattgtttatatagctttctagtgatgtctttgaaggcttctgagatagctacaattttgtttacatttaaaccaacaatatttattatgaaatacatttacgttgttcagcaaaactaaccaataaataagggtaaataaactagaagcccttcatgccttgtcctcccagaggtagcctgtctttgctgaggaagccactgtaaacagattcctgtgtgttctttgagaaagctgagtgtctacaaatacatagtgcacagatctcattattaagtccacctcattcacttggtgctttatcatagagatccatccatttctatatgtagaagtctgctttgtgccactgtagcatcctatctgattctcttgtgccgacgcctcgtgatttacctgtgccttgtaggacatttctgtctaggacgttttgccctttgtgcatatttacaaacaggtatgtgtaaacaaagacctagaaatgggaatagactgtgcatcttttcactcaaatgaatgttgtctatcagcattgatggtaacatcttgaggtagggaaagtctaccatcaagggaacagcttttcccagcactatgagaagaaagaaaagttgagtagctcaagcgcatacacacttttccatagcttaggaaagactgcagagtagtgatgaaagcaaaaggaagaaacacaatagagcttctcttaccacccccaggaaagaagaatccatgatgacactggtttcctaggccctttgctcacagagagctgttggcattataaggaagcctctgggccatcaaccgtagtcatgtcttcgcttcctaagccaggaggctgagcctacccaggcttaggaatgaacacaaacacagtccagagaggtatagcaagttctcaggttgtttgattttcaaatatcggacaccaattctagaaagagaaagcagctaagcctacctttctcgttcttttgtagggagaatgctggtaaggatagggtagggctgaggcgatttgggaggagccctgtttcttaaactcaggcaatcaaagtgaggtgaaatgccctgagtcgctttccttttcttaagggactccccgcatctggagttcattatttttaataatttgtttaaatatttaattttatttaattaagtgtttcaaaaaacaaaaaacaaaaaaacctgagatttctttcctaaggagcaagcactctgcagtgttttgaaggaaaggctcacgtccatgtgtgggacccactctgggaactctcccaacgtgagaaactaaagcctatgaaaccaagcttcaggcagaatactccagataggagaacgggccacctctgctgagggtggtgagcgtttgggggagtaactagaatgtaagctgaatctgagaaaatttagaaactgtcctttaattttttttttcaaaaacgatatgctaaaacccatataactatccactaaatctgtcaagaatctatcacattcatgctgcctctgtacatatatgaaagtaaggtatgggcagggtggcttcactcacccatattttgcaagagttcacggtaactcaacaatgttgcctagtaacatacaacacatacagtccatgttccatctccccatatcttctatggctgggttttttatcgttacttgggagatctaggctcatataccacctgctgtgtgatatctgcatatgtgttagtcgaaaacatttttttttttcaatttaatgagtagacctatctggttttgtgtctcatatctgtgatcctagctattctcaaaggtaaggcaagaagattacaaattcaaaacctgcctgggcaaacttagtgagaccctgtttcaaaataaaaaggtttaaagggctagggatgtagttcagtactggggtgcttgcctagcatagacaaggcttgagttcattctccaataccacaagaaaataaaattaaataaaataagaaagcaaaccaatacatggatagtcctgctaggttgttagaaaaagattagagtttgagagatggcttagtggttgagctgcttctaccatgcatgaagacctaaatctgcatgttcagaattcaggtgcacagcgataaatccattgttcctagacaaaataggatttagggacaggaaagtcacagagcctccttatctagctggtaggtagtgaacacagaagtaatcaaccaaaggacagacatgacagaagctaagaactgatatctgaggttgccctttgaccaccacatgtgaatacatacatacatatatatacatatgtgtgtatatatacatatatatacatatgtgtatatatattcactcagagccatgaacatgcttagacacacatacccacatacatgatacacacacacacacacacacacacacagagagagagagagagagagagagagagagagagagattaaaacttcccagcttccccccagagctacgagtcaaaccaacattttaataatcttcccagaataataaaatttgagaagccatgtgggaactgttacacctgcccttgattgttggttttgtggtattgactatgttataattctttagtagaacaatctacattctaggtctacctggggttatctatgcttgatattattatagcagctagggacaaatgtctggttatttatagttatatgtttagatacctcattaaggggacaactagcaacattttttcttgtcatgaatatgtaatctgtggtgtaacactctcaagacatgaatgtcttccactcagcagactggcatttcttgatgatccttatctctgaatactttattaccctgaggattatgatggagggttagtagatgctgtcatccttttgactcactaactatattcttctataaagatgagctctccattatgataatggcagaggtaggacccatcaagctagacaatgagtaaaggcatggcccagagaaagacaaattggattgtgagagttactagggtatgaacaatggtcagactacagagcaggccaagacataccaggaagtgagactaggtgaccacattcattgatagaggaggcccagagaacaaagtaccaactccatctttagagcaggaagagttcttaatctcacaacttcctgcagcaactttccaagactataagacctacttgcctattacaatacatcttgaagccagtcctactctaaaagtagctagtggatcagacatgatagcatggccaggagactaactacagtcagaatacctcagagcctatcctgaattcctgaatcagaatagcttttttcatgacatgttgcaagttggagaaacactggttattccactgttccaaatcccagacctgccaaaccaggagttcctaataaaaatactttccctaggggggtctcctatgactgccattcactctcccatttggtcttgggggaacatactgctgttttgtctgccttaatcgagagagtcaatgctatggagttattgatcttcataaacagtatggccaactttcttatctctgggatcttttgtaatgattaagtcatttctctgtgtttagacaactcttaattcttgaagtccacttaatgaccaatacaataaggcccagaaaggatttggttcccagagtaacctggattaagtgtttagttgtcttaccttagagatagtagagatctccatgtgctgtgacctaccttctaagacaatgaaaatcagaaaagaaacagatgtgaaattctccatagaatattccacactttagttgtcttggtaagtgttagtaatagaggacttagtttgaaaagcaaatacaggaacttacacacatttgttccatgccctccatttcattgctctaaaagcaaacagatctttcagcgaattaaaacaaactgaacacattataagggccagagcagttcctcttaaacagctactattttcaaacaatagctagtcatttacatgccatatcttgttatgtctgcaatagcccagagtaagaatcactggccaaagctctactcacagtaactaagggagagaaaaatacagttctaggctactgattggcttcttggagggttgggggggggggtcatttcacctggagggaaacagactgtgcatggtcattctttccattacacagaaagaactctagtactgttggaatgtccatcagatggcatagaagctgaaagaaaagagaaagtatacttaaggaaatgaagcagggtttggtaaccatggtgattgtttttccagagctactatggagatgagatgacagccttggggaagccatttgtttgcatctaggtcaagcctgtgtcctaccttactcaaagccaagcccttgagcaagatagttctcattttgcccagccaagatctcaaattccccaggcaaggtttattaaaacagtttacagacagcactcagcatagcgcctccggtctaaacaatctgacaaattctaacagtcgtcatcttgtctcataaatgtaagcagtcaccatgtcctaaggccttgcttctccatcctcaaataaaagagttgcttgagaatagggagaagagagcaatgaaatgcactgtccttggccaagtgaaaagttcactgaagaattttagtccagaattggccctagactctagtatcttggcatccttccttacaaaatcaacttgatggtctgtaagacatctaggtttgtctcttgctttgactatggaatcacatctgctatgagtagccagaggaagctgtagagactttgtgttcttcaacatagaaacagtcaaacttctgtcctgaattccctggactttaggtaaaagatgaagctacaggattccctgtcagtgcttttgccactggagaaatagaactctcagttgacaggcaaaaacaaggttttcccttctatgacaccatgccattacatacatttaggtcctcctcccagatacacatcttctatccttgatgatcaaaggttttctggaagtcaggggcatcaacatcacctgaggacttggagagataatggcaacccaagctctacccaaacctgctaaataaatttgcagcctgaggtcctcagcactaaagcttcagaaattctttctttactcactgtggtcctctcatggtgtgtgctacactcagtattctcattccatattgatttgtgtcttttcaatggctgttttaatgaaccaggcccatagcatatctttgaatgagtgactcaatgcacaccacagatgatccaagactgaacgagtgattctctagcatttctaccactgggatggctctgctggtgttgctcttctgctattcactctggtctctagtgtctaagaggatgtggggctcttggtactttcaaccatgttaggcttcatctaaaagacctttagttgtgtgtttgcacatcatgctaatcaaaagtcatgcttggcatcaagccagctgcttaatatgttttgaagcgctggctgttgtctcacaaaggcagcataaaggagaattttgtgatgtcaggttttcctaagaatcatatgggtagtcatgcaatcacagacgtaaagcactgttacacacattcagaactctaaggaaataaggcaacacaatcggaaaacaagcagaggggaaagtatcttccaaagcaacttcacatctcttccccctaaaaaactgagacccaaagttatagactttcttcagattagtgtgacaccaaagtttgtattcctgaggcctcttgagctgtattcctggcaagccacctcttggtctagagaagagacctactttgccgataacaatgtgtccacagaaggagaatgacagagctcttggggatataaattaaaatgatacatccagatagtcatcagctcttgcacataacactaagaaagtcagatataatttgttgttaactttcagctttggtagactttgggaaactatttttccatgaaaaattcatgaaaatgttcacccatttctagtgtatataattatatcagttaagtgcactagaggtgacttacttataccagtcaaaacataaatgtggcattccattcctttgtggaaagctacttatatgcctctctaggctgacatgtgaagatgtgagggacattggaaagctagtctctgaggaatctgttgggaaccagtgcccctccatctctgtgggccactttcacagaataagctaactacgtttctctttagtcccctctgacagtttcctcttcaacagacaatgtttccattaacctctcattcatttacataaaatctatgcagacatttatgattattatagaactcatttgtaatattgtgtggatgtatttacaaatacacctctgtttgtgctacatatttatgaatatttgcaaatctatctggccataagcctgggataaatccacgagatcagagacccagtttacttatatcatcccaatgtttggaatataaacattaataaaaacatcacaatttccaaccacaagcgaggtagaaagttatcttccaggtatgcttacaacacttttagatgaaccaaatatggaaagaagaaagtgtgtacatttattctgttcatttgatcatatgttgacttaaggggaaaaaacagtactgtgtgtggagaggaagaaagctcttgactgggaagtggaagttccaactgtggtactgagagctacaagctcgctgtgtgtcccgggacaagccttcctgtcctgtttcttgtatgtgagatgtagatggtaacccctatcttgtgtttctcataaacagatgggctggcatggatatgaagcccactatactcaaccaatgaatgagtattcaacctttaagggtcagagggtgggtgggttctaaattgcacagtgctttggggactcccagggtgaaaaggaagataagttgttttaatcagtgtcctcaccctgcccttctctcttcccttccaggactccactccaaatacaactgagaaggccccccttaaaggaggtaagagctcagatttaggaatgaatgtgtagtgaatcatgcagatgacaccacaaggtgtgatgcctgcttatcaaccggcaatgctgtgactgtccccaacaggagtgggacaggtggaagtggggctgattgagatgagctgatacttcggactcatctgggtagcccctgatcactgtgctaatccacacaaccctccctcctgccaggaacagtctcactaacaccattgctgtagccaagctgtggaccctgatggggtccttgtattttgagctggaagccctaaactgaacaaacttgcgtatgactcttgataccatttcgcacatggaagtctctgttacacatccattaaacacagatcactgtggttctagacgagccaatcagggacagctcataactgcttggcatgaaaactggtgtaaactattggtcaaataactggtcatagccaaaatacttaatgaagtttaagacctataaaaacagacttcttccctctacattaccagacacagaagctattaacatattggcctctactaatccctaaggggatatatgcagaggtcagttaacactgaagattaaactcaaggttatctgactagtttttttcatgactcagagaaggaaaaatcagagagatgaagtatcttgctttgatcatacaggctaaaccaaaaggtccttgactctgactcagtctttatattcgaaacatcagtctccaccttagctccactcacaattttcagagcccaggtaccaagcacagctgcctgagcacagaactggaagaagatggggcgggtagatagaccagggtagagatgctgggcacctttgggacaagagggtacaaaagaactgacacagctccttatagcagcaacacatttgaagtttcttcccttcaggacaatctactgaagacttagaatgtatgggcaaggagccctgggtagacaggcagccttctgaaccttttaagattgatgaataagctcaatattggccaaaaacacttagggccgagtatgtggtcttaattccctcactttgtgtagataaccagatatgcagtcaaagagagaggtaaagttagaagggcacagacactgcctacaaagatttagatagtaaatattctaggctttgcgtgccttggctgaatcagtcatgcagttaccatgattgagacagcctgaaaacacccaagtctgtgagcgtgactactatcccctgggcctcacttacagaataaacaatggttgggcttggcccatagactggaagagcagactcctgcggtacagggagtgtaggctttggaggtggacatcctcgctaacttgttgcatatgttcctgtggagctttgcaaggagcggcatgcagtgattaaacttaattcctccacctctccttccattgtcctgccaccaccccgacttagatttttctaggaaaaattggaagttttcatttggcaaggggcagtagccacctcccatagatataatgtctgtggtaaagatagccttgattcagtgtcaggaccccagccacactcactagctgttctttcttggttgtagagtgctccaaacattggtcaccaagtataaagctcttaactagtgggttacactgactagttacagtgctagttaactagcactgaccagagcctaggatgcagggctctgcacacatgctaagcacaggatatccttagatcacatgaaataaaagaaaacaaagaacaaagttgtcttcttgacagctgctacgttacacttaagatgaaaacactctttctgggaaagcatatcccactgtgctctggtgttagactgcccctcccatcacaggaagaaagtgacacagatgctaggttggctttgtcatgtattctgttttcatgatcataagaggcagaataaagcaaactttccatgttactccccggtttttcatttgagggaacaacttttgttcatgaaatcccaagtttgggaaactgtgggtttgaccacttcccagctccctcctcacctgtcccttgactaggaatatccgaacaagaactaacaccaacaccaacaccaaaataacctctgtctttaattcaggggttcgacaactagattctattcgtcaatgctgataatacgcctcactaggaatgttaaatttgccttaaagacttttccctacttcctttgggttggtctgaggatcagccttgagagttatcagtacggggtggagggatgggtgtattcccattgacattccgtttgcaggtaagtttctgagatccgggaagtcagggggacttgttaaaggctatacagaagacaaaagagtcctgcaaatatgagactccaaggtttcctctgttgcccctacttcagccagcaccctgctgtgcatggcccctaactcccacttttaatgtacatgcatacttaccttgactccacaaattgggggccctataataggatgagggagaaaaataacatctgaggccaaaacctggttcccacaccagcaggaactggtgtctctttaggaaaacttttctcccctctgaacatcactggactaaatatactaaattaattcaagttggagctagaaagaatgcttcttttacaagcctgtaggcaggtaaatgcttgctatgcagcatgaaagcctgagtcacatccccatcacccacataaaaagcaggagcagttgtatataccaataatacaagcattgagaacacagaaacaggaaggtctctgagtctcactggccaggcagcctacccaaactggaaggctctgggatcagtaagaaaccttgtcttaagaaataagacagtagggccgggcggtggtggtacacgcctttaatcccagcacttgggaggcagaggcaggcggatttctgagttcgaggccagcctggtctacaaagtgagttccaggacagccagggcgatacagagaaaccctgcctcaaaaaaacaaaaaaacaaacaaacaaaaaaaaaaaccccaaaaaaaaaaacaagaaagaaagaaagaaagaaagaagggagggagggagggagggagggagggagggagggnnnnnnnnnnnnnnnnnnnnaaagaaagaaagaaagaaagaaagaaagaaagaaagaaagaaagaaagaaagaaagaaagaaaggaaggaaggaaggaaggaaggaagaaagaaaggaagaaagacagcaagcaattgaggaagacatactgtgttgacctctaacctcacatgtatgcacacatgaatatgtatgtgcacacacactagcagagctctttgacacttcctgagactagaattctcttgtcctatatagaaagagagaaagaaatagcctgacagttgtctgaagaaaatctgaagccacaatctctttcaccaacaaactaatcttaagccaacacaagaaacaaattgcccttttgggaaaggaaaagaagcaggcagggaaaaagagaacactgttgcaagacatcccaggcagggcagacctactttccagaagttcctgggaggaagtcccagggatggcatgaggtttgtcacaaggacagaagctgcaaggattgcagctaccatgacagctgttgtaaccaggaaaccagcactgaccagagcctaggatgcagggctctgcacacatgctaagcacaggatatccttagctacagggaaaccacagaaaaccacacccgtgttagtaatgagccctaacacaaacttgtcattcctggccagaataggacccagtcaatggctgacttgcactcggcccactgtgcttgaggcttgttagccattcagttgaattcatggacaaactggaaggctgggaggcaagcctgtcctgtatgcttcgtgctgggttttattctctcctctagcagacagaggtaacatgcctcctgcagagaaccaccatgaacatgaaatcaagccaaaaatacaccttcatgttcccacttggctggacctcagagcatccatctggtccactttgctcttccatcttccatgaaacagtctgcctcctccacatacagcttaaaaccaaggctcctgcatcctcttgtcatttcttgttttaatgttttgcttccagtgagttttgactctctagtgttgctcactactgggctcattcgtccaaatctcagattatagggctctttacctggatttcccaggagtttcaactactgccctgggtctgcttttccccctccagaccccaccaggcaccgttcctcacaaggctggactggtaggaatgaagcttagccaaggcaggtaggttagacaggatcttgtactgaatgagatcaggagaaacagccttctccagagacagttttcagtgaaacagctctctttattagggaagaacaagaactatctaacccttggggcatgggtaggggcttgcagggtgagtgttcatctttggctggggcacaagtgctggggaatgtttcatttgcataaagaggaatcccaggtgcttgtaggacatatccttataagggtgagatgaagtttaacctataatctggccagcaggctatgtgacaacctcaatggtggtggaggtggggggtcataaggcttacattgcctggccgtgcaagcccagagcaaggaggaagcagtcctactcctgcctgactcaagacaagattttcagggtttggacacaattcatcctcactcttgctctgaaccagctcccctggtcacacagctttccagccccatgcccaacaaaacctcaaatctttgtataccaatatctgcagaaggatgtaagatgtgcagaaatgctgtcaggacaaaatggtacagtactgtgcctcccagcaggtggtggaggcgtctggggttctcttttgtaaagctgaagatatttcagccactaggaacttctcaaaggctagcatactctgtcaccaagttctgggatggacagagagggccactggtgctttgggacaggcttgagagggtcatgtgacctggagtgattccatatcctgtcattagaaaaagttgttggtttgggttttttgtttctgtttttggttttggttttggtttttggttttgtttttttgttttgctttttttttaacttgtttattttgctttggtttttttcttgcaaatgcttatgtggcccatggtacccagaggtccttaatgtcctgaggatgttcataccgtccaaagctaaaagggaaaaatgggcatcaaaagaggtgaaatgaggcaggctatatgataaagaaatactgagtgtgagaaaaccgtacagccagggagactaatttctccccagtattttactgacccaaatggtctatgaccatttgtcatatagaagccacactgaaggcacaaggaatgacagtcttccttgtcctcacactcccttcccctcagaagaataaacactggctggcagagtcttactctgtcagtggaatggggctggatccagaatatccacgtctgcagttgttactcctgggttccatttttcttcgtcccctttgcagcatcatacgatgctttcccatggggataaattgcttttcagccggtcacatacttcacttgccacaaggaacctatttgttcctccagtcaatcttaacacactcaataaaacctgctcttaaacccactttcttttgctcaaggcagagataagaggaattaggaatctctctgtggaaaatacccaggaagtgagccattctgaatgatgtggaatggagtcctgcataggctatctagcattctaaagccacaactcctaattttcatacatacccaaaaaagaatgaggaggcaggagacaacatgaggtataggggagaggagagaacacaaagaaggtaaaaaggtttccatttgatgctagaattgccagatataattcccagtctccagctccagaggatatgccaacttgcctatcatcctgcactttaagaggatggaagaaggagggaaataaagggagaggaggggggaggagggaagaagggtagatagtactagacctcaaactggttcctttttatactctgttcaagccccagagacatctgtgtgccaggcaggtaacccaggccccagaccagagaaggggagccactatttggtattatttgtgtggtatgcaataggctcagtgttgtccattattccatttaatcctcttgcaagcggttaaggtggatgcgctcactttgaggaagaaggagcaactcggaaagtctcacatactcggggtaatccgtacaagcagtagggaaccagggtgggatttggactcacacgggtctcatatcctgagagcgcttctgtgcttccgcactgcaaatgagcggtggcacaggaaaggccatttagaatgttagaagagtcttacaatgtttcttaaacagccccaccaccaactgtcaggcccatcagtctttaacatgcattacctgcaatgaagtgccctagagtcagatgtgtttaccttactaccacaacaggtcagcacttccagctcccaaaagccttcacagtattgatgtggatcctaacttcattttaacccatttctgttcattgttttctctgtgttcaacaataagcatgctgtctattagggattttttttttcaaggaccgttgtgaatccagagtctcccttttacatatgacttctcttgagattcctgtctatatcataaatattcttggcctggtagcatcaaggaaatggttagatttgaaggaatgtctgtgaagtgaccctttgcacaatgcccgccaggttaagagttcccattgatcccaaattcggctgggaatgaagattcctctagatgtcgctgttgggactttccctgggtattcattctccagggaagaagaaactaaaacgtttcttctgtttcttcaaagattaagatatttccaagaggtcttcaccctcccctcccccacaaaatcagagagtctcaaacaattgtgtagagaactgagaaaacctactctcacaggcgatacagtgtttcatccctccccgccccaccccttcaaatcagagagcctcaaacaattgtgtccagaagtgggaaactctactctcacaggtaatacagtgtttcattttaatgagcatctcgttatctaatcctctctgtatggcatcacagagctatcccaagaaaacaagaaaaagagacaaaaagaaaagcgacctcacattctcagagtcacggctagccatgtgctgtgtctgttactagacatctgtaatcttaatgtgtgtcatattagctacgcatctctgttgagtgtcactgggtttacttcactggtacagtaaggagctgaagttctgggagaggaaatgacggatccaacaccttcactagaaccacatgttctctgagaagcaccatctgcccggtccttataggagtcgttctgaagaagttgactaggtcacaaatcatctgactcgaaagccccatttccctgacctgtgacttgacccgggcactctcccagactcaggatcaggaaggcaccctgaagctgctttcccagcaacgtcctccagctgtctcctgaggcttcagtcccgggtgtgtgtaatggctacagactcatctctcctccctttaaccctcactgctctagaatgatctagaaaggcatttctacatctcagtcaacaatgttccccatctaaataggaacgctaaaatctgaaagagaatattccagactcccaacatccaaacatcaactaagcctcttctctcagaataaacccctccagactcaggcactgaggagacagattgcagagatacagtctagatgctcagtccacaaatctctggagccacagcaagattcctactgcctggggcacctatacaagtcttcatatccacaatagactatcttatcatgggttcacaagctgatgagacttgagttgcatgactggtaccccacaaaatattgtctaggtcttagcaagatccctgtgactttcaaagcggccagcccactttttgaacagcactgactggccaaatattcaagctcccatctctgtgacttgggttataacttgggtgtccttcttatatgtctgccccggaaaccatgtgaggaaaaggagatcagagtggtgttagttgtcagctgagagcattttaagccttcagaagccactaagactcttggggtttgaaccccaccacgcatccttcactcttcttttgctgacacctccaaaagtgaagtaacagagatggcacccttctccaaggtcttcttccagctcaacagtgtcaatctctcaatacccagcccctccttgaaccaactccagcaatggcattcttagaaggagaagcctgtgcttagtcttaagcatgaaactatctaatcaattcttgaagaaaaactacagtatgcctgccatttgacttcaggaaatgcaaatgcttcaaaataaggtagactttttccatcattgggtttctcagaattacagctgaggtcaccccactgtacacatgaagaccaaaggggaaaaacagaagaaaaaaacgcctgcatgtgtgagagacaagcctgggcttgtacttctgccaccatctgtagatgctcagctctggcagatatcaccacaagccacctgatacagagggaccttaggactagagagatagagcctgtttttgatgtgacatcctggctttgatccagggcatgaatcctacttttccacctaacttagaatctgtgagagtcaggccaatattctccctgccaggggaaaaagcaagcactccttctcactacactgatgcccttagcactggtccagccagagctacagaaggaaataagagagatggtctagttgactccactcagcaaatgcatcttcttggctgatcagtaggagagactaaacagtagtctctgccaggatgtgttttaaaggacaactggcttgatagaggcagggcattccacttgacaggaaccagaggtatgcaggtggaagcatatccatgtagttgtgtactggagctgcacgtctccaaacttgtgtagagtggggggaaatccgtttgggcattagagtcacactgactgagttttgatctccaccctactagcaactagatgtgtggctgagaacaagccagttaaccctttcttattcatctatttatttatttatattccaactgctgcaccctcatcccattcctccctcacagagtccttcttcccatttcccctccccttctcctctaggaggatgctcccccactcctcacccatatatcccctcccaccctggaatatcaagtccctgcaggattaattatgcacatcctctcctgctgaggcaatacaaagcagtcctctgcttcatacttcatacggcatctgcatctgtttcagtcagctgccgggtagagcatctcagaggacagttatgctagactcctgtctgcaagcacaacatggcatccgtaatagtgtcagagattagtgtttacccaagggataggtctcaagttgggccgttattgtttggccatttcttcagtctctgctccatctttgcccaccctccagttaaacttttaaaacctatagtttctaatgtaaataacagagataactgtaaactatctctcatgggatgattgtaaaaattaaatctcttatgggatgcttgtaaaaaaatgtaaaaatgaaatcatggctgtagcatgctcagtaaaacattacagaaatagtcaacattagttatgatggtggtagtggtgatgacatttattactattaagacacagaataaaatgagggagggtatgggctgatactggagagattgggaggagtcaaaagcccatcagagctgtagggaacataaattagaaagtgattcacagcaaagagagtccgatttgcatctctctggtttcttttggttgatgttctacagtcccaaagatgagattggacaacagtcacacttccttagactattacactttgggatcaaatttctggttatacacatccacgagtatgtgcagggcagcaacaagcctcacaagaacactgcttagatgataattatgggctaagatctagagagtggaagctggccttcagcctttgatgggccagaagccccgtgtgagtccagaacagctagagatgaatactgcccctacttctgctgggggttcctctagtagtgagcttgctcagacagcagagggaacccttcactcagcttctagctgttctcggggccccagggtctttctcgaatgaatctggacaataagataaaggaagtaactggtagtacccatgtgtctctgtttagtttctgtttccaggatctgtccgttggtgagtcgggtgttgaagtctcccactattattgtgtgaggtgcaatgtgtgctttgagctttactaaagtttctttaatgaatgtggctgcccttgcgtttggagcatagatatttagaattgagagttcattttgtagatgaacttttggtagatttttacctttgatgagtatgaagtgccccttcttgtctttttagataactttgagttggaagtcaattttatttgatattagaatggctactccagcttgtttcttcagaccatttgcttgaaaattgctttccagccttttactctgaggtagtgtctgtctttatccccgaggtgggtttcctgtaagcagcaaaatgttgggtcctgtttgtgtagccagtttgttagtctatatctttttattgggtaattgagtcctttgatgttaagagaaatcaaagaaaagtaattggtgtttcctgcatggtactggtacagcgacagacaggtaggtagatcaatggaatagaattgaagacccagaaatgaacccacacacctatggtcacttgatctttgacaagggagctaaaaccatccagtggaaaaaagacagcattttcaacaattggtgctggcacaactggttgttatcatgtagaaggatgagaattaatccattcttatctccttgtacaaagctcaagtctaagtggatcaaagaactccacataaaaccacagacactgaaatttatagaggagaaagtggggaaaacccttaaagatatgggctcaggggaaaaaattcctaaacagaacagcaatggtctgtgctgtaagatcaagaatcgacaaatgggacctcataaaattgcaaagcttctgtagggcaaaagatactgtcaataagacaaaaaggccaccaacagattggaaaagaatttttaccaatcctaaatctgataggggactaatatccaatatatacaaagagctcaagaagctgaactccagagattcaaataatcccattataaaatggggctcagagctgaacaaagaattctcaactgaggaataccaaagggctgtgaagcactttaaaaatgttcagcatccttaattatcagggaaatgcaaatcaaaacaaccctgagattctacctcacaccagtcagaatggctaggatcgaaatttcaggtgacagcagatgctggtgaggatgtggagaaagaggaacactcctccattgttggtgggattgcaagctggtacaaccactctggaaatcagtctggcagttcctcagaaaactggacatagtactactggtagatccagcaatacctccccttgacatatacccagaagatgttccaaccggtaagaaggacacatgctccactatgttcatagcagccttatttataatagccagaagctggaaagaacccagatgtccctcaacagaggaatggatacagaaaatgtggtacatttagacaatggagtagtacttagctattaaaaaatgaatttatgaaattcttgggcaaatggatgtatctggaggatatcatcctgagtgaggtaacccaatcacaaaagaagtaacttgatatgcactcactgattagtggatattagcctagaaacctatcaaggaggaagaccaacgcatggatacttcattcctccctagaatagggaataaaatattcatggaaggagttgcagagacaaagtttggagctaagacgaaaggaaggaccatccagagactgcctcacccaggggccccatcccataatcagctaccaaacacagacattattgcatacgccagcaagattttgctgaagggaccctgatatagctgtctcctgtgagaccttgccagtgcctggcaaatatagaagtggatgttcacagtcatctataggatagaacacaggcctccaatataggagctagagaaagtatccaagagctgaaggggtctgcaaccctataggtgggacaaaaatatgaactagtcagtacccccagatcttgtgtctctagctgcatatgtatcagaagatggcctagttggccatcattaggaagagaggccccttggtctatcaaactttatatgtcccagtcaggggaatgccagggccaagaagtgggagtgattgggtgagggaacagggtgggggaagggtataggggacttttgggatagcatttgaaatgtaaatgaagtaaatatctaattaaaaaatgtggaggaaaaagaaagtaactgggagctcaggacatactactcagagacagtatgtaagctcggcagggcgtggctcctattgtatgagttaaaactgttagtttctgaaggatggactgagtggtcatctctggtgacatcatcaaaatatgtcaatgtcagattggagagtttccagttctccagatagggggaaccaaggcccaaagaagaggagatctgctccaaatacattgaatttgagtcactgcaggaaatgtataatttggttctttgcatacaaaatagcttgttataataagaaagagtgatcatcatcagtgatgatattaaacatatttttatttctctaatgctataatgacacaaatagcatgtttgtctctattaaagaagctccagatgggaggcttcctgctaagatgtcatcaatgttttgtcctcttaaaatttgaaggggatgtttttatctttgcagtctagatgaggcagatgtagggcatcctcacattcccatgtgctcactcaaccctgagtatgcccttgagtgtcttcagacataaaagttggccctgggttactctgagaaccaggttagctgatgctggtaaaagcagaggctagtttctgccaagcagaagatgctgggtagaaaaacctgcatcagtgttgctgttggagagactggtgttcaggctgaaggacatgggaggctcaatctcatttgacctatgggtggtgttcaataaaacctttcatgagaactctctagaacggtgtcccacactagatgatatttatcttctgtagtattctctaacagtcctagcagaaggaaactaaaactgtgaaaatcctaggctgtttaacagcaagatttgaaaacaagtttgagggattgttgttgtgattgttgttgttgttgttgttgttgtcgtcgtcatcatcatcatcatcagtggtgtgtgtgtgtgtgtgtgtgtgtgtgtgtgtgtgtgtgtgtgtggtgtttgtgcttaatttaacctcacaaacaggaacagacgagtaaatttcatctcagtgggtcacggaaaaagatgtagttgtttacagtccccaaagaagcaaacgacaacgcatacctgatcttcttttaggaaattgctcagaggatctcttctgtaccctgaaaagtactccatccaagaagtcatgggcctacctccaaggtcagtagccaaagctagagaatgatatcctcatgaggatgatgtcctatgccgacttccaatccagagtagagtcctctagttgaaagtgacatgtaaatgtgttcttagccaacatcatactttttataaattgaatttcaatgtcttagaggaagatgagagtttttttttttccaaagctacaaggctcttctctcaacccccatttgataggggaaaaagaagttggttagaaatggcacggttatcatatgccccagtacaggggaatgccggggccaggaaaagggagtgggtgggttggggagcagggcagggggagggtataggggactttcgggataacatttgaaatgtaaatgaagaaaataattaaaaaaagaaagaaatggcacggttaaaaaaataaaaaccatgagctttgagggagctgcattagggcccacattggaagcagctatggacaggtgggcaggtgttcacaagctccctcggctgctgggaaacacttcattcactcctctaggtttcctatctgtactttaaagacatttttgtcccttgactgcatcatgtcctccttcctctactacccccactaccatgcatggacttattagtttgggccaaatgcagtcttttcccgaatgcaaagaaagaacgactccatctctacctctatgaaggtattcacaggggaactacaaaattgcctggtccccagactgacagcttaatgggcttcttggtgcagggcctgtttgcatattgcagtgtgcttcagggaagagtcttttgtaaatgaaacagtaagaggcacttagaacttgaaagaatgagccatggaagagatgggcaagattctccaaatagccattttgctcatttaaaggaaaaaaaaatcttcattttgcagttacattagttcttgcctttcaattgaactgcaacaaggattgaagagaaagcattgaatcaattaaaaccagtatgccaccttcccagttctgaaggcacctttaccagtcagtgctaaatttcatttgttaggactcagagacttggctttcacacaaacacttttgcttagaggctgtaattctctgcttttctataatcctacgtgctgggtccctcactgtgcacatgaggggcccatgcaaggatgtttgattgcactttaaagaaaagaggctttcaaaacttcagaccatgttaaaaggtgtatgttattttttatcagcacatattaattgcctgcaataataagtttaattgttgatattttttatgaatgaacataaccaacttttattttatcttaaatacaaagattaatagacatactcctgaaaaactcaatactgaaattgaatagtattgtatgtcacagctctgccaccacccacaatgcatattgaaacattaaatgctcgttcattaacaaataacacaatagcatgacctttgtgtaaaatacagcctaggtggatgtggtctgaaaaagcaaggagctagggaaatggcataggcagtcaagtgactgactttcaagcatgaggctcagagctggggtactggaatctgctttttaaaagccaaacatggtccctcatgcttgcaatgccagtactgctaaggcaaaagtagggcgatccgtggagcacatcgactgaccagtttggcctactgggcaagattctggatggtgaaaatccctgtatcaaaaacacaagttatggagctggagagatggctcagcagttaagagtgttttctcttccagaagacccaaatttttttttcccaacattcacatcaagtgtctcaaaactgcctatagttccatctccagggtatccgatgccctcttctggcctctgtaggcacaacacacacacacacacacacacacacacacacacatacacacacacgctgaatatactcatagagacaaacacacatacacataaacaaaaataaacctttatttaaaaaaaaaacagaaacaaggtagatggtaccagtactgtgcatactggtacggtataaaggctgatatccaaggctgtcttctgggttaaacatgcacatgtacacagacaggtacacctgcacctgcacctgcacacatgcctggatctaacacatatagacatagaaacatacacactgaacaaagggtaaaaaaaaattaacaagtgtcaaatgatatgagataataataaaaagaaagtcatctataggagctgcctcccattagaaaattctctgtaaagtctttcgttttccaatacagtgttgtatgtgatccaaccctatagtctgagcattaaacaacgaaaggcagatggttttattcctgtgacttcctaagtatatataaaaaaaataagctataaaagaatattctagaaagggtacttcagaagatgtttaaatatttgggatggcaagtacccttctagaaaacagagatgctgagtgggaaccttgaaaaagaggtttccaagatgtacctaacatgtaagtaataattctatctttccagtgtcaaagcatctcaacaataccaaactgtcatggaacgaagatggcaccatccacggactcatataccaggacgggaacctgatagtccaattccctggcttgtacttcatcgtttgccaactgcagttcctcgtgcagtgctcaaatcattctgtggacctgacattgcagctcctcatcaattccaagatcaaaaagcagacgttggtaacagtgtgtgagtctggagttcagagtaagaacatctaccagaatctctctcagtttttgctgcattacttacaggtcaactctaccatatcagtcagggtggataatttccagtatgtggatacaaacactttccctcttgataatgtgctatccgtcttcttatatagtagctcagactgaatagttgttcttaacctttatgaaaatgctgtctaccatacagtacttcatctgtccaaacatgggccaaagaaaatattaggacaactcaaactaagcatgtgagttagtgcacttctctttctgtcctttggaaaaatacaaacccaggatttagaaagtggagtctccttcagatgcacaaacaggaaagaatgtgatatgtgcacagagacctacttgggcactagaaggggttgagttgtcccagtataaccactaattcactgaccttgagccatttttccttcccctggaacttggggtctgaatctggaaaagtaggagatgagatttacatttccccaatattttcttcaactcagaagacgagactgtggagctgagctccctacacagatgaaggcctcccatggcatgaggaaaatgatggtaccagtaatgtctgtctgactgtcatctcagcaagtcctaaggacttccatgctgccttgttgaaagatactctaacctcttgtaatgggcaaagtgatcctgtctctcactgaggggagtagctgctgccatctcctgagacatacatggagacattttctgcccaaattccattctgtgtgcagtttttaagtattcccccaaaagttcttgacaatgagaactttgaatgtgggaagagcttctggacagcaaacattaacagcttctcctgaccagagagaccatgcaagcttggtcttagacccatcaagcttgaggtttctacattgtgggagacagacttttgacaaaccatttgagttgatgtctgggcccctgggagttctccttcagtaaggagagcaagccgttctagtgctgtgtcagaggatggagtaaaatagacacttttctgaaggaaaggagaacaaagttccagaaaaaggctagaaaatgtttaaaaggaaaagaaaaaactcagcttttctcatatgagaggaacccagaaaaacaacactgaaaaagaagagtggctctgtcaacctcctcttaggtctcctcctctctagttattgggaaaggagttgcatggtacaggacaagttctggtgtgtggtcaaatagaatcagatgtggagaacaccatgcagagaataaggagacctgtcatatttgtgttgtactcaaatgaggggcaaatgaatcttaggctaaatcaaataacagtctctgtcaagctgtgctcagaaagtcaaccactgaagatggagggtgaggcacgtcatttaaaaaaagtgaaatgtagcaaaatgaaaacaaatacagacaatacttattaataagtcaactggagtgtaagtaggaagcagacagcccaggagtttgaaactaaactaatgatacttttaagggttaaccagcccctgtgggactttctagtacacctgtaataattatatttttcattgatatgacagaatacctggcagatacaactaaagaaaaatatttattttggctcatattttaaaaaaagatacagtccacaatgaccagaaggcaaggccataggaagatgggggtggggggtcacgttgagttcacggtcaagaagtagagagagatggactctggtatttatctttttctctttttcttcatttattcagtctgagattctagccaataagatagtgcttcccaccttcaagatggctctaccatccttagttgaatctctctagagacactagtacagaacaagctgggtgtatgtctcctagtagattccaaatcctgtgaacttgacagtgaagattaattatcaccacattcatggaagtaggcacatcattttttctaaccagatgcttaggctgcctgagactcatatttgcttagtgaaaattcagtgcatttcctcgtgaacttgaggaaaattgtgtgtaaaaagtttatgtataagttgatgaaatgttccacctctggagtgaggtcagttagccctggtggggttcctgttatgtagaaattcagggaacaccaatccctatccagtcctcaaggacttgcatccagccccctgattccagctctgctgttcctcatcaggcttctttggacatcccacagcctttgtgaaaagcttcaggtcacatctctccaggccacactgaagcggccccagcatccagggactccttggccctcctttgtgtacccctgccatttcgtctccatcttctatggatttggcccataactgagacacagaagagggatagagctataactttaggaccctcagaaccaaaggagtttgtgatcaatccaatactatttttagattaaaaataataaagcttattgtttaattttaacctatacatatatataggtgtacatgtatgtgtgtatatacacatatatgtgtatgtatatatttccagtcatgttttacatatctgcttagcctaggtcaggggatgaagcctgactcttgctttgggaattgcaaagcttgtatatgtttatatttatttttaattaagaagaaaatataatatttttcctaggcttcatcagcttatttaattattgttaatatttttccagatttccatctgcttcaactttttttaaatggagatagatcttagccacactcttccataccccactccctctccaagaagtcaaaactgctgtctggaagtctatgcctgccttccatttacataaatttacatttgttttctaataagaatgtataggacaattttgtgtgctttttatttttttaataaaagatatactttatataacatcttgtgacttccaatgttttatgtaatactaaagttttgaggtttacccagaccaaaaaaataaataaataaaaaacttcaatctagttctttcacttaaacatgagatgtttgttttgttgttttaatatatctctgcccattctcataaagacaaatattggattcacttccaaggtttcactgtcagtttaatgtattgataaaagagacttttctccttgtggagctcccacttcacatgttccccatagctgctggcttcatcatggccagtgagggcgtagacacccaataaccacgtttgaagaccagagcttagtcttaggaatctgaaatgtctttctgtctcttgtgagaactgctcttctctgtacacccagtcaacacttctgtcctgagctgcagttcacaacaagcctcatggtaggtaccagtgtgcaaccagttatggtgagtgaacttacaccatgcctttccaaaggattttggatcttttctagatttggtcccttttttctggagagtaattgaaaaactactggtcctaggtgcttttttccccccattttccccagtatcccatgggctgactatccacttttgtagattcatgtgacagttttcttccaattcctataaaaacgcatccctagcttgcttcagacttagatccagccatctgccttcaggagcctcctgagactctataatgaagactgacatgcaccagcttgtgcagcagttttgtccagaactatatcttttcaacccagaaaaaatatttcacatttgccaacaaggaccaagccaaaacaaaacaaatcaaaacaaaacaaaacaaaacaaaacttgtacttaccatctaaactatatgatactctcattagttatacagtgtattttgtaaacctctatcttagtatgaaatccaaacattgcaaagctaaaatatacttcccttaccctagtcgctaggactccagtgctattgagtctgagatgagcaggacttgggaatgtttgtccactcagtcagcaagcacaacactgaaaaggcacttgggttcactctgcagctatattgacacacgtttcagtgttcagttgctaacagaatacatcacggggagactgaaaagagctgaaagagcatcattctggcaatgtaatattgcccacagcagtggggcagcctcctaattgaattggttttctgtttatgatagcagtgttatggttctagaaaggcctgactcttggtggcctgattattgaagggatgactgctactgtggcatctcactgtaggtagaagttgcccataaaggctcaatctgtttttaaagtactatgatcaatctctagctggtctcagtaacgtgctaaaataaagtctgtcccctcttgtggattcctatcagacacagtctcaatatggtcagaccggctgcacttagctattgtcctcttctagcagtctttatgatccttcttctttcctaccttgaccattcctccagtatctaattccatccactaccagctcactcacgctattcaaatcccaattcacacccctagcagtctcactccttacaagccatctcctgacagcattaataattgagagtagaagcagtcatttatcaagctcttacatggttggcacttttcatatactcttttgtttcatccccaaatcagccttaggagataaacatcatcagacttatgcaaccagtaatgacacagagagtccaagccttgaggtagctgagccaacatcttacaggcagagtttaactaggaaactacatggctccctactttatgctggcccctccccctgctgcctttgttcaaatcacctttaattccttcccgttcctgcagccttccatatttccctgtcaccaggtgtgtgatttcttcattcccatggaaagctcactccacattttcctttccattgctctgctttccatttccatgtttctccctgatgggagtcttccagatcttctggtgtccccccatcctcagtgacacactctccactggagcctttggttctctcaatggacatctccactgacatccaaatcccagaaggcagcacttattcagcgcagctcctgagatatggctgactatttattgaatattttataatgaattttgaagaaagccatttagtgcccaagttcatcttatggaaagaacattgtctaggacgtcgggttaccacgtcaacagttaaaaataagcccaaaatattgaaatgtagcctgaatgtgatagttttcttacaaatgatttttagtactcaagaggatacctattattaggcattctattaggtatctattaaacaaagataacatgtgcagaagacaaaattcacccaggaatctgagaatttaaagggggaaaggccagtctcctttgcctttactggatgactcttataagcaaaccatactatgcattctactctgaggtatgcgtctgctccttctatcatattgattttagaaataattagtgagcatactaaccataagagttagattaacttttggtgtacttcagaatcacatgaaaggtggtggtggtggtggtaattgtgtggtggtggtggtggtggtggtggcgtcagtagcggtggcagttgttattattgttatagtatcattgtttgtattcctaaaatcccaggctacatacaatagcaattaaattataatctctgaggttagactgtaagcatcaggattatttttaagttctcaaactttaaactaaagtttaagagttaataatgggttttgaagggtagatgacagaagatttagggtgtggattaaccaagtctaagaattacaaaaaagttttatgaagacctgccccatatttgtaagtcaattacaaaatacgtttttaaaggctattaaacaaaggtggggaattctgctcctagaagacatgagttattaaataaaaatctcagggccagacataggatatctctctatgacctattggtcagggaggccccacagatctctaaaacaatgcaatctgttgtctaggcttccatcataactagatgataaggccctattaatgaagacaccacacactttgcagagaactcaatctcaaattaaccaggaacctccctttcatagtaccatacttgccactggaagagagaagacatcaatgatcttatctagaatgggttctgtaagctacaataccactcccagctaagatgtccacggatggaatgagttacagggataacaaactgttttctgatttagtttgggttttgctccacaggatggaagtcatatctgatgttgtaaacatagccagaagtgcatggccgggaagatcactgtccctagggaggatcagactattgttattttgctggagcaaactactttagccagcttctcaaactgccttttaaatatttatgttatgcccaaaggtcggtactacactcaacactggtcagagaaagtggtttttgcagtggccagcagtcattactggtctgaaaataagtgattatgaggacttaaccctaaatgagagcactataaactctcccccagtacttaacaaaaggggggggggcgggaaaaaaaagagctaaaggacagggagaatgctattttatagcgttctataaaatgttagcttctggatatggcatggctgttgtgcttatgacctcagtaactgtggttacctgcacaagatcaagccagtcaaaagtccaacatggatggaggaggggctcactaatccttccttctacctcaggacctattgtcacttgatagggaaagaagagtcatttttctttgagggcatagccactaataggttacccatacttcagtatatggtctcatgcccatatacacttgagtggcactaactggatgcaatgggatattgttatgccagggcctcttgggtgccacagaagaactctaagaattgccaacccactgtaatataacaaaagagcctttatttgaatcagacctagatagcaaaccttccccacaggttaagaatgcgatactggagtctagctaggggctggaagtttttatgcataagcagggatcctcagctttggggttacatgatggggaggtgacaagaaaaaccatccctcaaactcaatactgtttgttcagacagcaaggcagaattgtgcagctgggagaggactcctctgacctgagggctatcaggaactagtttttacaactggccacagctgtctgggaatacctaattgcccttctctcctggacaaaaagtggagtactgatctttgcaaggatgcttggttcatttttctcaaggacgggagccattaacactgggaagtgctagttatctaccagggaggatcccagcctcagagatacggaagttgggataagtattcccaaagctagtatctgccactcctctgaaagggaggggagtcattaaggagtgccaccatgaaaagggagattgcaatattctggtcccaggttggactcttcctgttgggagaggggagtggagctctgcttcagcagcaggaatgtacagagacaggcaggcttcctgcatctcttcatcacacccaaagagcttgggactctcctttctctctcttgtttggtgagatgatgattaaggcaatcactggactgagcacagggtcctcaatggaggagctagagaatggacccaaggagctgatggagtttgcaacctcacagaaggaacaacaatatgaaccaaccagtacccccagagctcccagggactaaaccaccaaccaaagagtacacacggagggactcaaggttccagccccatatgtagcagaggatagccttgtgggacatcattgagaagagatgtccttggtcctgtgaaggccccagtgtaggggaatcccagaacaggtaagtgagagtgggtgggttggtgagcagggggagagaggatgggatagggggtttttggaggggagatgaggaaaggggataacatttgaaatgttaatatagacagtatctaataataaaaaataaacttaaaaaataaaaacataaaataatccttggcatcatttaaagaatcagatggtatcttcctgggaatcaccctgatttatgaaatcactttgacttaaataaaaagtcaaaatgtgtgcttattcagtattgttaggggagggtttcatgaggctctgcccatagctgaggggctattggcaattgatagctgaggcgtgcctttttcttttgtgggtgcagctactggacccccacacatgcacagatttcccagtgcacctgcaggatacactaactgagctcagtgaacaggagatgaaggtgaatagagtatgatgcaagcaaggtacattgtatctgagtgtacaattggtaaggataaataaaagtatttttggataaaaaatttaaatgcatgctaaaataaatgagcaaagcttttaaagttaattgtttaaattttcaacattcaaattacgtcctgatgttggcatcacccagcaacttggagaaaaaggagcatctcttacagatatggaacaggacatggatttttgttaaggatcttgttaaagaaatatcccaaggtaccactctatctagagaacactggcttctctagtaaagatgatggcttagagtctactctatcccccattcctccagctctgtctacctttggaagtagcatatcctttcccttcctgcatctaggcaaatgtgacagcctacacattagagaacgcatcagtatataaacacaatgctttcattcattggaaattatcatccatttttaaactttgcccttttgctcactctctccgtgggactcttgggaaagagctgcgggctgggataagagtatgcccattgtggtgaaagctttggacaccatcaagatgctctggtgaggattgtcccttccctgtagtaaagaaaggagagaaaacatgtagagattaacaatgggaagagacagtcactacagcatcagcatgcttgagtgttaagtcctcgtaaaagaaattgctaaccttctgacctcagcaagtctcttggactctttgttcctctgctttaaaatgagaagaatcctttccaacgccaccaagtcaggatacgtactaagtttgaaaagtatgcagctgggggtattttattgtggacactttctctaaaagaccttggcttgtggagagcagagaaggagataacgaatcaatgcaggtttgaaagaaataaaggttcattatgcacaaaggtgtttccttctgcatcaggagaaaacagccattggctcactcagcaaagacctccatgaagcaaacactcaaagggtgagtatatctacaatccctacaaaatggagaactccttagggtcaggcttccacagaggcagaacaccaaggaccctctccttaagtctacgctgaggcagccccagacccgccgctgcagataagccccttgtccacatagaaatgaagcagaaattcatctctgaagcagcacgaaccaaggtgtctggcacaaacagaacttggaaatagaattgcaccatcagtagaatgagggaatgaccagcttgagttattgacgaatgtatctcggggcacacgaagctgaaggtcagtcctcctccaagagaacccagcctaagtaattcactattccattctcatggcttagaccacagatgacataactgtggtgaccttctgactctgcccttttctgactctctggtttccttttactagctgtccacatagagtcagcagaagctctggagtaaacaggaaaaaaaaatgcccatcccatcccaggatagacagttgcagctaagaaaccaacagccaaatgctgaaggaaactctgttcctgctgctgatgcatgttcacaaagacacagagctcaactgtgatctttccaggttcctctgatgtcattcatgatgtattgacttaatccattctatagcacgtaagcacgattgctgacgcttattgaatccaggcagtacgctaaaccttccagacactgtaggccatttcatgctcccaataatcacatgagattattggagaaacagaggttcaaagaaatgcaaaagcttgtccaagagtaagcagcttcttagctgaagaaccagttgtaaacattcaccatctggctcccgagtctcatctatcgtcagagagtggtgagcagccaggaggccacttgcctttgtgcaagcgtcatccataaggattttgccccacctctaccctttcagcttagttaacttgacctttttcacaaaattccatatcagatcttatttctcaggagccactatcaggctaagttagaccatgagacttaatggtctcaccaccagagtcattcactctctgcaccctatgtgtctgaccttgttctctgagaacaatatccaaatgcagaatgcattccctcccgtgtgtacaaagtaaaaccatccctccttctagttattctggcctgatcctcctcccattcacactctattgtgggctacagaaaaggacttgctcatttaagcctctgcagaaccttgagtcttgattctggtttctccacaaatggggtacctgttctctttgccactgacacttgggagtggaaaagtatgaattcaataataccattcaccctaagtcaaacccagtatggccaggaaatagctcacacccccatacagaatcatacagctctttctgtaattcggagtcttggcacaacttttctgggttccagacaggggaagaagtttggccacccccatcccaacgtgtgtactcatttcctgcccaggacaaaccacttcccttcatgagcgcctgtatcttgggtaaaaccccacccccacctccaggctgtcatcttgtgctgtgagcccaacctcacaatcatccagcactccggtattagtactttttccaaattgtatgtgattcatctgcatctaccatcattgtgatccca

SEQ ID NO: 146 - DNA, 1768 bp, Mus musculus
caagtcacatgatccaggatgcaggggaaaatccttcttggaacagagctgggtacagaaccgaatcagatgaggagagataaggtgtgatgtgggacagactatataaagcatggagccagggctgcaacaagcaggcagctgtggggctccttcccctgacccagccatgcaggtgcagcccggctcggtagccagcccctggagaagcacgaggccctggagaagcacaagtcgcagctacttctacctcagcaccaccgcactggtgtgccttgttgtggcagtggcgatcattctggtactggtagtccagaaaaaggactccactccaaatacaactgagaaggccccccttaaaggaggaaattgctcagaggatctcttctgtaccctgaaaagtactccatccaagaagtcatgggcctacctccaagtgtcaaagcatctcaacaataccaaactgtcatggaacgaagatggcaccatccacggactcatataccaggacgggaacctgatagtccaattccctggcttgtacttcatcgtttgccaactgcagttcctcgtgcagtgctcaaatcattctgtggacctgacattgcagctcctcatcaattccaagatcaaaaagcagacgttggtaacagtgtgtgagtctggagttcagagtaagaacatctaccagaatctctctcagtttttgctgcattacttacaggtcaactctaccatatcagtcagggtggataatttccagtatgtggatacaaacactttccctcttgataatgtgctatccgtcttcttatatagtagctcagactgaatagttgttcttaacctttatgaaaatgctgtctaccatacagtacttcatctgtccaaacatgggccaaagaaaatattaggacaactcaaactaagcatgtgagttagtgcacttctctttctgtcctttggaaaaatacaaacccaggatttagaaagtggagtctccttcagatgcacaaacaggaaagaatgtgatatgtgcacagagacctacttgggcactagaaggggttgagttgtcccagtataaccactaattcactgaccttgagccatttttccttcccctggaacttggggtctgaatctggaaaagtaggagatgagatttacatttccccaatattttcttcaactcagaagacgagactgtggagctgagctccctacacagatgaaggcctcccatggcatgaggaaaatgatggtaccagtaatgtctgtctgactgtcatctcagcaagtcctaaggacttccatgctgccttgttgaaagatactctaacctcttgtaatgggcaaagtgatcctgtctctcactgaggggagtagctgctgccatctcctgagacatacatggagacattttctgcccaaattccattctgtgtgcagtttttaagtattcccccaaaagttcttgacaatgagaactttgaatgtgggaagagcttctggacagcaaacattaacagcttctcctgaccagagagaccatgcaagcttggtcttagacccatcaagcttgaggtttctacattgtgggagacagacttttgacaaaccatttgagttgatgtctgggcccctgggagttctccttcagtaaggagagcaagccgttctagtgctgtgtcagaggatggagtaaaatagacacttttctgaaggaaaggagaacaaagttccagaaaaaggctagaaaatgttt

SEQ ID NO: 147 - protein, 240 aa, Mus musculus
SMEPGLQQAGSCGAPSPDPAMQVQPGSVASPWRSTRPWRSTSRSYFYLSTTALVCLVVAVAIILVLVVQKKDSTPNTTEKAPLKGGNCSEDLFCTLKSTPSKKSWAYLQVSKHLNNTKLSWNEDGTIHGLIYQDGNLIVQFPGLYFIVCQLQFLVQCSNHSVDLTLQLLINSKIKKQTLVTVCESGVQSKNIYQNLSQFLLHYLQVNSTISVRVDNFQYVDTNTFPLDNVLSVFLYSSSD

SEQ ID NO: 148 - DNA, 47756 bp, Homo sapiens
gctcacccctggccaggtgtggtggcttacatttgtaatactagcactttgggaggccaaggcaggaggattgctttagcctaggtgttcaagaccagactgggcaatatagcgagacttccactctacaaaaatttatttttaattagccaggcatagtggcacatgcctgcaatcctagctacttagggcactgagctggtatatgtaaagtttttgttttgttttgttactattattatattttattttcttgctataaagacataggtatacgtcaagttttaataaaatgcctttgctttctctttaggaaaatgactatggagtaaccttatagcactattccctggaagctattccccgataaaggtggaatggcattgttaatgaggaaaatgacatctgattgataaactgaggtgggaggatggcttgagccccggaggtcaaggctgcagtgagcagcatgcagtgatcatgccactgtactccagtctgggcaacagagcaagaccctacctcagaaaaaaaaaaaagaaaagaaaaatgaaagcaaaggctcagatcctttcaacaaatgtaaattaagtgcccgctatgtattatacaaggagattcaggtgttttaaacacacaatatccatcctttaaccactctaaaagtgaaaatgattattatcacgctaccagtggaaacaactgagacttggggtgactgagtggcccccctaaaggctgcaagcacctaccttattgcagggcttcatagatgtttgttttggagtagaagaaagtggaaggggagttgaagccagatctgcatttcctagacacctctttgaactattcttcaaatattcagtcttctatagcttcactgaggacaaatttcccagagaaatttgctccactcagtctttccattttcaacaccttttgcatcccccacattgactatcccctctctggcccctctgcccataggcatcaagcaaacacccacacttgggcaattactgtcttccaatcctccctttctttgcacagctgaaagttcaatgttaagaaggcgaagtaattaaaagtataaaaagaaaaaaatcactgtaaaatgaattggtgctctatgctgtggttcacctgtttctcttttgcttgtcttttcacagctgaatatatgcaccactgtacagctaatgtacctgtccaatctgatatagcttactcaattgccctatccatgcagagatacattgatttttacttcaaaaccaacaccaccaagcttcctatttcatagaaattgaaaaaaaaaagaaaaagcccactttaaagagaaaaggtcacttcctgattttgctaacatcaggaaacaaagctttagatctttcagtacctgcctccgtccccaacaaagcctataaatctagcataaccagaggacagatgccttgactgattgtacatgtgaaaagtttgagtaactcagaaattagccattcttcttttcaaaaaatttcagatcttgaacttctaaaatgtactcagattcagatctctctctttctctctctttctttctttcttgaaatagcgtttgttcatccaaactttttgcacaccaattatgttccaggaaccattccaagaaggcaccagtcccctgagacatctatgtgcaacattttctatctacttctgtttcgaaaacatgtgtgagtacatgcacttagaggcaaaaggcagagtggggagagacagatatttggaggatggaagtcagcaagagggaaccagagaaaaagccaggcctgagctgagatctcttttctgggatggtcctgtgtttttggatctctgtaaaatgaaaaaaaaaaaaaaaaaaaaaaaaagccttaaaacaaatcgtgtttttcctgatattttgtatttaaaattactaggtaaatgtacagtttaaacatttattaggagcctgctaggcatgaacatgtacaaaccacatgctgtattctcaaggtgcttacactgcatttggggagaggcctacatagctacctagaatacaggtaatataattacatactggttacagcaactttctctggaatcaggcagacctgtgcaacaatgctttgagaagaaagaagggagagttgttcttgtctggagatgtagcccagtgatttatttggctagcttggagtctcacacttcaagtcaacataagaaaggctcacccctggccaggtgtggtggcttacatttgaaatactagcactttgggaggccaaggcaggaggattgctttagcctaggtgttcaagaccagactgggcaatatagcgagacttccactctacaaaaatttatttttaattagccaggcatagtggcacatgcctgcaatcctagctacttaggggactgagttggtatatgtaaagtttttgttttgttttgttactttctccgtcaattagtagcagtaaaaacttggaaaagccattttgccactccaagtctcagtttctttatctgccaaatgtgaataatagcattagtgggattattgtcaaactaagtgaaattatgagcatcatgtgcttagcacataaaatcgtaatatgagctcactaaaggtaggccgttgttgtgacggtaaaatagtaattagtactctcatcattattgattgcaggtagaagcataatatgaaaccctacagaggaaagaaggatttctttcttactggaagttgagggaggaagcacagaaatgaggcaatatatgagcagtaacttttttttttttaatgaaagatgtatgaaagggttttcgatgtcacaatgaggatgccgcctgcacaaaaatggagtcaggcactggggttggaataaagaagtgtgcctggagtcaagggagtggaatcagaggctgaaaacaaagctaaggggaaggccagggaggccttccaaggaaacatgaccaggattttgcaggcacggggagatgttgaaagattttaaactggaagaggaagggagtgaaatgaactagaaagagtttgggttggagccttactcgtcaagctagtgtagaggtagaagagttaacctcaatgaagtcccctagagaatgacagatcagcttaagatttccctactgtgtacacataacaccatgaattgtctgttattaatataaattaggttatataataattacttatttaacttcttgtcttacccaccttactgtaagtttcatgaaagcagagataatgtttgacttgctcattgttacatgggcagcacctagcacatattaagctctcaaatacccaatggatgtctcttcctttatccattattaatcgatatagaaggactttccccagctttgcaaagaatgcagactcatctctcttctttgaatgacaatggagttattaaggaccatgtaactaatagagttttctagccattcagctatactggaagcccccagaagccagaaaagtgatgttcttttttattttttatttccttgaatctcctacttccctagtattagtttatcattagtcctgcatcactaaaaatcataaaactacattaaaaaaaagtttcagtatttccacttggtaaaatctgccattatcctaattcattgcaatggcatgctttaaattcatagattacattcatctggtattttggaatatgttgcatatctcaaagcgctaatataaccagcaatatatccatttctccttttaagctcatctgctttttatgaccaaagagagttatgcaatccaatgtatctgcttcttttccctggttaccaggaagctcataaatatacatgttatgcttaactattaaaactgttatcagacaggatttcttaatacattcactttactctctacttttatatcttgactcctaccttttactttgtgttaatggcttcagtatatacctgtgcatttattttacattgtctcaaaacctttttaaggttgacaggaagatgatagatagggagatagatagatagatagatagatagatagatagatagatagatagatgatagatcaatagataaatatatgatttaaatacacacatatatatatcaccaatactggaagtatatctatctaactcccagatggcttctgtcccacctttctatcagctctgtcttcttcagtaatctatttttgtcatccaccaaccagaacacatagcttctctacaattagtgaattccaaaaagaatcttctcacatgaagcatgagttaacaatttagacattagggaagattttatagagttgcctttttttttgtaccaatttatgggccacatgtgaaattttgttacatgtgtataatgcacagtgatcaaatcatggtatttagggtgtccagctcctgagtaaagtatatttttgtttaaatatagtcatactactctactatcaatcagtgaatttattttttctatcctctgtatattcatacgctttaacccacttctctttgtcttcccactccccctgcactcacccttcccagtttatattcttcatctttctactctctacctccacgtgacccaattttttagctgccacttgtaaatgagaacatgtgatatttgtctttttgtgcctgcttatttcacttaagataatgatctctagtttaatccatgttgttgcaaatgacatgattttagtctttgttatggccaaatagtatttcattgtgcatatataccatattttctgtatccattcatctgtttatgaacacttaagttgattccacatctttgctattgtgaatagtgctgcagtaaacatatgagtgcaggtatctctttgatatactgattgttttcctctgggtagagacccagtagtgggattgctggatcaaatggtagttctattttcagctttatgaggactcttcgtatgatttttcatggtggctgtactggtttacattcctaccaatagggaattgagttcctttttctctgcatggaagtgtattaggaaatgcatttctgttctttttcccagatctctttcggttaccctgccttgagtctattttaatactctaaaccaagggtcagcaagctttctctgtaaaggtctaaatagcaaatattttagacttcggcagctgtgaggtctctgttgaaaccactcagatttgctgttgtagtggaattgaagccatagatgtatacacaaagggatataattacatttcaatacaacttcaattacaaaaataggtgcctgccagatttggcctatggttcagtttgctagccctgttccaaatcttcctcccactgcccctgtcctcactgggccctctcaatgaagtgtcactgtggctcgactccaacatccaatctcttcaagttagccccagcaagacaaagagctctaaagttaaagggacaggaccctccctcctcaaaaggccatttagttacatgtgttattgcttgaatataccctgggtgagtctgtccttgtctcacatatacccatagtttaaaaatatatattcctaccatgtacagtgatcatcaaaagataatcttaaatggataaaattattaagttacttttaatggcaaaaaccgcaatcacttttgcaccaatctaatgatttttaaatggagtaaaatgtctccattctattccaaatatatctgcattccagaaaggttctgaaggtatttctagagcctgcagccgtagtcaaggttagaaagagggctcaataaagggagcagaaaaactagtctgtaaaccaacatgacccagctacatggccccagacaataacttttattatgcctcagtttccctacctacacaatggaggtggtagtttacctgtccaaaggctaaattttggaccagatgatctcttggagattgtttccctaaatcagtgtttttcaaatggtctcaggcatctgcattccctggggtgctttgttaaaacagactaccagaccccagcctgagtttctgaattagagtaggtctagagggtcttaaagtggcaccaagttcccaggtgctactgctgccactgctggtgtgggcttacacctgaaggcctctagtctctacaacagagatctcccagtcccttatacaggaaagcaatgttggaggaatggctactgctggcttccctttacttttcaaaatggctttccttcttgaagggatgagacgttagttctatttgcccactgagtctcaggcactgcagccacatctcagcagccaattccaggctgaaaggaggctgggtggtcactctcatgaggccattctctggagaaagatagagacacggagtacagttgagaagagagaggcaagaatgccaccacacaattcctttacataagccactcttctagaactttctctttccataaacatgaagcatagattgaaggtcaaccctgcatatatgaccagcagcaagaaacgcaaggtgggatgcaaggacttagaagactaggaaagtgcagaccgccctcagggactctcatcttatgagcaaggcaacatttacatgtgtttacacacttgggttccacatcaagagaagtagataattagacaattaggttatgtggcatgaaaatagaggcattccagagagggtgttggtggacttgagagatctgggcaagcattcctggagatggtgaggcgggttggcaaaggctggaagggagaggaagaacaggagcagtggaaagccaagtaaaacacgagaggaagcctggatgcacctggaatattagcagagccgacatgagaatgagcagagagggccgggcaagcagagggggttgggtgcggtagctcatgcctgtaatcccagcactttgggaggccgagacaggcagattacgaggtcaggagttcaagaccagcctggccaacatggtgaaaccctatctctacaaaagattaaaaaaaaaaaaaaatagccaggcctaggggtgtgtgcctgtaatcccagcaactcaggaggctgaggcaggagaatcacttgaacctaggaggcagaggttgcagtgagccgagattgcgccattacactccaacctgggtgacagggcgagactcagtcaaaaaaaaaaaaaaaaaaaaaaaaggagagagaatgagcagaagggactcttacacctgtctctctccctgatggtatgtacttcctttagttgttcccatttctgtgtcccagtttcctccttttgtggaatgaaggattcaagccaaattttctgaagtttctaaattttattcaccttggagagaccccatgccagaaaagggcaaatgagcaggtgaagcttagcccttctctttgtcccacctgtgcttcagccaaagcagccctgttttcttatgtttttatattccttatacagctttgcttccagaaaggatttaaaacttactcaacaagaaattctataaaggctccttccatctgcacatcgtacagcttgagtagaagacagaaagaagccagttagcacaggtcatggatttctatgttggccaggctagattctagaacagctggaaagcagagaggggcttagagcaatgggggtgggaaatagggagccactgaaggtttgtgagtagaggagtgtcacagcaaaagaatgaattgagcccacaaactactgtactaggaactgatccgaaaatctcaactgctcagaaagttgagtaaaaacaaagggtgatttttcccccttgtcagccttccctcccaggacattgtattgtatgcaaaacgggtaactgtaagacaaacatttttttccactgcccttctcagccccacaggccttcaggaagacccgaacttcaagcaaagcctttttatttttcaacacccacagcttccattcaacaatcagaagttttccactttgatcaaagaggctgaacaagagggccaagggagcagctggttctcagcaactctgggcagaccacagagcccttgctacccactcactgtccgtgcccaccagaggacacagccttctccccaaatcagccaggtacatgccccagaaaacactggcttgcctcgttcccaccttaattaccggaccaaacgaacgtgaacacactgttttcaaaaccaaactcaattgggatcacgggggcctcggtttccttgattgtaaaatgggtatatcgccccccactctatttagcccaagaaaacaatttatctcttgatgtctctttcgtctccaggatctatgcttttacagactcactgggaggaaatatccagaccaaatcctaaagcctgatctaatttgggagatgctcagaagttttggttctatgcaagaacagcagtggtaataatccaagcttggctttagacacaggacgtttccttaggggcatctgggatctctgctggctcaaagtgatgcgctgcagacaaaaagtgagcagaaaggaaaggaggtgctatgcagaatgagcttcttccacggtgataccaaatggagctttcaaaggcccacatctggaggcagcagctatgcagtgattaacattttaaacggtattttgaaatggagatcattagtaaccacagatgtgatctgactctgtcccccaggtaatctgtctattgtatctaaattccagacttagcccagtagacagcttgggatgtttaacaggaattgtccaacaccatccccaaatctatttttattcatggagtactctgacatcatctcgcttggtcttcctgatgactgtaatgcagattgggaacagagaaagccataaagacttgtatgatggcccaaggctaagaagggaaagggctgagaccacacttcaggttttagctttcaggtgcagtgaagattgaatgacttagcacgagctttcagccaggcaggctgcaaagtgcacccaagttctttcagtgatcgacacttgcgacttaggttgagatagttttcatcctccctgagcctcagttttcccatctgtaaaaaataaacattgcctgcctcggagggtggaggtggaagtggaatgaagccacatgtaactcctagcgctgtgcctgagacagtagaggttcaattatagtagtcacatacacacacaacacatacatacacaagacacaacacaccacacacaacacatacatacacaccacacacaacacttacatacgcaccacactcggcatgcattgcagatcacaaatgcacaccacacacacactgcatacatataccatagagaacacacaacacctacacatacccccataccacaaatacacacacactacatagtacaccacgcagaacacacacagcccccatattccacaccacaccatctcactgccaattccttcccctcttcatgagttttacggcaggtccaggttcatctgccagtttaacagatcccaaaacttctgcaggagtgtttgttcaaaagattgatatttccagattcctgctttctgacagtatctttgaaccccaaatttcatactgccatgagccagtccccctttggagaaatatctccatttgtgtgccctttttcccccagggaacctgcagcatgtccctttttcagcagtagcctatcaaaccgaaccctttggagttattacactgcagtccgagggatccggcctccctgagacccagcaaggactcattatctggggaggtcttctgagccacaggcctcgctgaaagaaggtgcagcttcttgaacaggaaggcgttttgtggcagagtctaaacgaaacagaagttgctttgtgtgtgcgcacgcatgcacacacacacacacacacacacacatacacacacacagtcggggaaccgtcattttcctacgcgccctctgacatcagccaccttctctgtagctagtttctctgcacacaacttaatccctggcaatgaaaaatgaacctctcccccacccttgctgccgcctctcgcctcacgcccccagagaagagtttctccaccaggcagcaggtgaaggtttttttccaagtcacatgattcaggattcagggggagaatccttcttggaacagagatgggcccagaactgaatcagatgaagagagataaggtgtgatgtggggaagactatataaagaatggacccagggctgcagcaagcactcaacggaatggcccctcctggagacacagccatgcatgtgccggcgggctccgtggccagccacctggggaccacgagccgcagctatttctatttgaccacagccactctggctctgtgccttgtcttcacggtggccactattatggtgttggtcgttcagaggacggtaagtggactcctcttcctccctttccttttcttgttgttttcccgagagaaagagccctgggaacaaatgatattcgtttgttggttaagagcacaaaataaaattaaataaataaactctctctctctatatatatatatatactatagtatatactgtataacgtaatacacttatgttacataatatatattatattatacagtatatattatatatatatatatatatgagaaagggagaaaagaaagaggaacttaactctctaaaataatttggcttgttgagaaaaatattgttagaccatcatcttaaaactttgcagatctgtctgagcaaaacagtggaggggagctattggccttttaaagttaagatttaaatcttaatgagccagagacccatatcaaggaaggaagcaatagagaaacctgataacacatttgcacaagttgttatcatgtcttcaaggacttcagactggattctgaggttctatatcctaagtctgagtgtcctggaggtttctgaggcctcacccattgccaagagttttgtttttgcttttgttttatacaaggagctaagtttcagaggccaaggtctagaaggaaaggaggcgaaagagaagaccatggcttcttagagctttggacattttggtgttaaagccagcaagacaaatcgaaagcttcctcttaagccacaactttgaagaagttagggcgtcacaaaaaaaaaaaaaaaagaaacagcacatagaagcagaaagttgaaaggtttttagcacctgttctctctgatgttcctcacaatactaagcaatcgttgggtacacactgtacagggtcagactgtcttcggagatttactttgaagtaaatggtaagatttgtttctgaaaacagaagaggaggagaaagaggaagcttcttcatattttagaaaattggtgtttacagagaatctaccagtatatattatatagaaaatgctgtagtaatagcatatattgctcatgaattttttgatgaagttgttaatgggtaatttaagagctgcacccacccacatgacctgccaaagtgagaatatttctgtttcttacttcatagtgcctacttttcgtggtattataatcctgctgaatttattctggtttttcttcagttttcttaggccaagtactctatagcttatcaattgctggaaagaactaggctttaaaaggctttgatatctatttctcaagtgtcatcaagctttgaaattaaatggaagctttgaagctcatatctctacaaaagtgaaaagaaggagttgcaaatatttgatttagatagtggaattcttaaaactcataatttaatggcttatctacatctattaagtataataatcttgaaaacactttaggacatcttttcttctgcaggggctctgcaatttctgtaattctaatttggagtgaaccaagggtatgtcattttatagcaatggccaaagaaaagaaattgaagtgtcctttaagaagttctttagttaaaggatccaactagaactgctgagagagagagagagatggtggaaaaatgggtggcgatggtgatatataaagctagagagaacttcagagctcattcatatccaacttttagttgaattgatttcttctataaaagaaccagagcagatctttctgcctcatttttgtaaatgtggaaaatgaggagcagagagggaacagggcttgaactacgtcaccctgagaaagtggtagagccaatactgcttgattgcttgatgcaagcagcatcccctttgccaatacagacagccacagaagcactaagaaacattgcacccactcttctcttgggagctttatcttcttgtgcatccacttccttgacttacccctcatgtttggatatgaaaagattcactgtgcaatctgattgtacagtgcggtgtgctgtgatttcttagaccaggaaatatcagttgcttccttaaaattaaggcttgccatgttaatagtagccgtggtatataaagtgtcaaatgcattgcacatatcattttcaataaattcctcagaccttaactgttgtaagacctaacaagaaaaaaaaaagcatcattttcccattaacttgagttatcaggaagggtttcctataggaagatggaatgtagactgacttgaaaacaggaagaactcagacaagtgaagagactctaaaagaaactctaggaaagaaatcaatgggagaaagccaaggagcttagactcacatcaccattattaaaaatggaatgagttaatggtcaattagcactctgtatgtgatgggaacaggggtggagaaccataagaatggttttactggcacaagaagtcacacaattcttatcccaaggcacgtgtatagacaaaatttaaaacagctaagtcataacatataatgagtgattaaagggataccatgacaccacaagttaaggagagaatatatttttccagacaggtttaagaaaaactcctggggattagtttcaggttggcttgagaaatgtgaacaatttcaaacaggcagggaagggaaagcagaggagaggcactcctagccaatggaacagcatgagcaaagagacagaggagagaagacagagaaagtgtagggaaatcaacaaagcttgccttgaggtttgacttgaagatcagataactccaagcttaaactccttgggagagacaaaggaggaacttaggtttctatctcaaatatttattaaatatctactgtgtgcaggacattgttctaaagccttgaaaaaaaacaacaaaatccctgtctttgagttactatggaacttacttctttcctgtgatatttttgaagcctcagtggtggttgtattttgttttatttacatttaagccagcatatttataaaataaatactattttatataataatattactttatattataaaataaacattttatattataaatatattataaaataaacattttatattataaatatattataaaataaacattttatgttataaatatattataaaataaacattttatattataaatattatattataaaataatattttatgttatttaatattttataatatattgatatattttataatatttatattaggaaatactatacttacatggtttaagaaaagtaactagcaaataagagaaaagaaagtaaaaatcttcacaccttccccacccaaccactaatccctcttcacggagataaccaccattgacagattcttgtgtgtccttccaaaaatctgtgcatctacaaatacacagtacacattataatatataataaacccatgggtcattataataaacccataattttgcatcttgctttattcacttgacaacacactgtatatcttagagatccttccatgtcagtacatagaagttcatttcattcttttgaagagtcgcatagtacgaagtgtaaatgcttcataatttatctgtgcctggtgagagacatcaatgttttctctagaatttgtgccctctgtgcgtgtctgcaagtatatctggggaataaatttttagtgataggaatggaatgtgcattttctttttttctttttttggagacagtctcgctctgtcgcccaggctggagtgcagtggcgcgatctctgctcactgcaagctccgcctcccggattccccccattctcctgcctcagtctcccgagtagctggaactacaggtgcccgccaccacgcctggctaatttttttgtatttttagtagagacggggtttcaccgtgttagccaggaggaatgtgcattttcgcttcaataaatgtcagtctgtctccaaagagattgtactagtgtacccctgaggaattaaaagtcctaccaacagacacttctttacatcaatatggaaagaaaaaaatgatttactgttgagcaagcacaattgtacatgcaaataggcagcctgcaacagactacaaagtcaggatgaaatttcacacaattaatctagcaaagcaaaagaagaaaaaataaaacttctcttatctcctcaagagacaggggaatacataatgagatagacaatgagatagactcctaggttaacaccacaggtaggtgtttacatttcaaaaagcctctgaagccctcaaccttagagacgtctttgttttgtaaaccaggagactgggcttctctagccccaggggagaatgtaaagggttacattccaaaaggttggagtatagggttcacaatcggtaggctttcaagaaagaagctgcctcttttccctttataagcaaaaaaaattctttttttaaaaataataataataatactctttttaaattatctccacaccaacagtggagctgagcacctgtttaaggggagtaattattggtggtggtgatggtggtgtggtattttgggtttatttttaagctcagatacaaaatagaagtgtagggtaaacacacctgatatagcaataactgaagcatacccttagaataaccacatatggcagacacgtctgaatgggtgttccaagctagagagtccaggagtggtcaacctggagactcattccttgtctgtgaggaacatctgagcccccagcccatcccgtggaacatgggccatacaggagattgaggcctgagtttttggttacatgaaggctgccaggtggaggccattaaggggaggctgttaagtgagcatgctatagaaactgcatgctatttgcaagtggttgtggttttcctgcccaacccaccaccactggacggtatataaggtgaatatgttgtccagcctgctgccatgagatcatttctgtccgtaaagcagttttcctgttcagctcactgccactggactctctcccctgtatgtaagcccccaataaaaccccacatcttgtttgctgactctacacctcttctttagcctcttgaacatggtgccttccctgttgagctaataggagttcggcacaagaagaagttatttggaatgccccatgacacttcccactacccaaggtactccctccacctgacattcattccatttagcaatccagaaaaatccactgtaaatcttcccaggagcgagccctgtgtgaggttatgtggggaggtccccagtggaaggggcaagaccctgtcttctgggaactctgttaaattgagcagatgaagcccaaacaccaagttcttgggttccgggcagaatggcacagaatgccacagagcaaaggagaagtcatttctgcttgggatgaaggaggagtttgtagaagagctagaacaaaagccaggcttccaagaattacaacagtcatggcttattcccaaagtcttattttgaaaatgttcaaacctacagaaaagtggaatggcaaatgctaatataaccttggcacctagattgctgtgtcaatatcttgctgtatttttgctctctctatataaggatatgaaagtaagctggaggcagcatgacctttcactcacatgtacttcagtacccatctcttaactaactgcaatgccattatcattgccaagagagttaatattaattcaataatatcatctaataataatatatggtccatattttaatttctttacttgttcaaaaatgtcttataggtatggctgttgtgtttttgtttgtttgaaccaatctagggtcacatactgtgttatgataatatctgttttaatctagaactttgctttttaaagtgtggtcctgggccttgttagaaattcaaaatctcagggctcaccccagatctcctgaatccgaatctgcattttaacaagctcctcaggtgatctgtatgcacattaaagtttgagaagcaccgagctaaaatctcctttgccctttggtgtttgttttaaataacattgacctttttttaaagggtccaggccaattctgttgtagaaatccattcatagcctggatttgtcttagtattaactcatggttatactcagatgaaacatttttagtaagaatagtatataggtaattctatatacgtcttattgtagcacagctagagacatatgtcaggttgtcccattttttttgactataggtttagtcacttgattaaagcggtgaccaccaactatcgcctttgtaaaacattttttctttctcattaacaagtaatctggccaggagcagtggctcatgcctgtaatcccaacactttgggaggcaaaggtgtgtggatcacttgaggccaggatttcaagaccaggctggccaacatggcgaaatcctgtctctacaaaaaatactaaaattagccggatgtggtggcacacacctgtagtcccagctactagggaggctgaggcaggagaatctcttgaacccaggaggccaaggttgcagtgaacagagatggcaccactgcactccagcctgagtgacagagtgagatttcatctcaaaaaaaaaaaaagaaagaaagaaagaaagaaagaaagaaagaaagaaagaaagaaagaaaaagaaagaaaagtaatctatgtatgggataatactctgaagacataaatactcttcacttggtggttttgccatttcttaatgatccttgtctgaatcagctaatgcactgagggttgaaaaagagggaatgcctaagtctgtcactccttccaaatttattagctgtcattcttctgtagagaagagctccccattggaaagatggtggcaggaggaggaggagcaggatattccaggtgaggcaaaagagaaagcagtggcacagcccataagaaggcaagcccaggtgtgaggagaggaatggtagggccagaagtcagtccagattgtacagaggagaagaaacggaactagatgataaaaagatttgatagaagagacggagaggacaggatatcactgccatcttcaaactagaaagatttcctaagcccatatctgagcccaaatctatactcagcctcctacagccatctctcaagacctcaggtgttctgattgcctactgagtagtgtatttaagactttgctactcaaggtgtggtccatggcctggcaacattggcatcacctggatgctcatcaaaaatgcaaaacctaagggcccctccctactgagtcagaatctgcttttaccaaaatcccccgatgctggtcagtcttttaaagtgggagaagcactgctttaagccactgtggtccacttctcactttggcagaccatgtgctcccagtaaaaatagtcttcccctgaggattttctatgacttctattcacttttccatgaaatttcaggagatttttctgctcagctttatcctgccctcatctagagaggcaatgtagcaggacattgaagagcagtgccttcaaagtcaaacacctaagtttgaatcccttctgtgctattcgccacctgtgggaccttctataaacattatcacattatgaaatcacttctctaagtcttgatgaatccgtaactcttggggtcaagttaaaggccaaatgaaatagtgcatgtagagtaaccctcattaagtgcccaatgaattagcttgaaaataagaggtatccttggcaaaagtccctttgggccatgagccagagcccaccttacaagactatgtgagggcaacaaggaaaggaatgtggacttcccctggcatattccaaacagagctgcctttgatcatttttggtccacgggggcattttgtgtccaaagcaaattcaggagctcattgcatctgctgatcattcctctgtgaaaagaaacaagcctttcaaggtattgaggcaaattaagcacatcattaacaccaaggcagtgctcaaaatagctatgcttttcaaatacttgctaacactttataatatcttatgatgtccacaataacccagtggaaagatggatgattagccatctaaccactgattaaaggagaagaaaacactccaaggcaaggaagatggttgggatgggggtcattttacctggagacaaacaggttaaacatgaccattcctccctccatacatgaaaataactttattactgttgggaatactcatcagacatctacagaggccaaaaacagaggaagtacacttaaggaagtatacctcgttgataaccacggagacaaagtttcctgagctactcagtggagctgagaatgaaaacctgggagagtccatttgtttgtgcctgcattcagcctaggcactaccttacacaaagccaagtcattgagcaagatagttcacatttcctgagctaggacccagatccccagacaagattagggagagaattctaggactgggggacatcttgccaaagaggagttggtgaacaacacttagtgtaatacctgtttatgaacagtcttcactgaatttcaacagccatcatctccttagacattgcttctccacctccaaatgcagggactgcttatgggagaggggaggagggaggaatgagctcttctatcctttgtttctggaaacagcatctctcctagggcagtggaaagtacaccagagaatttcagtccaagatctgcctctgactcatgagtgccttggtttcctcctccataaaattagcttgatggactgaaagatgtctcaatctccctctggctttgattgtctaatcttgactaccatgggtagctaggagaagctgtaaagacctcatcccaagagctcttcaaaataggaatagtcacgcttctgtcatggacttcctgggccctgggtgaaggtttaaatgacaggtttctttcctgtttgagatgctctgcttttgacatcccatgtctgaaattaggaaaccagaatgcattcaagtgacagagagaaaagaggctttccttgacccccatataaattaggtcctcctctctgatattacttctcacagctgtgctattcaaagtgttctgtgggccaggagtgtcagtattactcgaaagctgccagaaatacagaatgttggccaggtgcggtggctcacgcttgtaatcccagcactttgggaggcccaggcgggcagatcacaagaggtcaggagttcaagaccagcctggtcaacatggcgaaatcccgtctctactaaaaatacaaaaattagccgggggtggtggtgggcccctgtagtcccagctactggggaggctgaggtagaggaattgctcgaatccaggagatggaggctacagtgagccgagattgcgccactgcactccagcctgggtgacagagtgaggctccatctcaaaaagaaaaaaatgcagaatgttaaactccccccaaatctgcagaatcagaatttgcattttaacgagactcccaggtgattcatatgcacattgaagttctaacagcactaccttaaagcactatgattcttttcctccatagctcttgccacaacctgcaattctaattacacatttatttatattttttaaatggctgccttaatgactaaagcataaaatccataggatgtcttttagtgactaacgtagttcctaccacagaccaggtgctcattcaaggtgtgctgcatgaatgattctctaggacttcccgaactgctagcagcctctgcaatgatggctgtaccaggtttgctattctagcctctctcactgtccctgtatatgtccctgggcagcttgatgaatttgatgattgtggtaagacatttcaatgcagatatttttcttagtgcatttgcacatcatgctaatcaatggtcacgcttggcagtaagttgtaagttgtttattaaattttaaaatgttgtgtgttgtctcacaagggcaacataaaggggaattttgtgatatcaagttttcctgcaaactgcatgcataactgaaagactacaaaaacttagctttgttaggttaaaagctttcaactaaggcaacaaagtcgtagactgttacagtaggaagggccttccaggacaagtttgcctcccttcccctgagaaggtagggcccaaatgtttaagctgacttcccccatctccagattggtgctgtgccagggctttgccttcaggagacctccttgactcactaccaacctcttgcactagagaagagatccattcataagaaaacaagctttcagcggaaggcaaatgacagacctcccagggaaatgttacaataataggggaactccagatggtcctagtgttcatacagaacactaagaaaataagctgtgggcggctgctaatttcttgctttggtagaggttaggaagttggttttttcgcatacacacgctcacacctctctaggtctttactaatattttaattcaatgcaatacaggagattccaacctgggcaggtcaaaagatgaataaaatacttcattccttattggcagaatattgtatgggtgtctccatggctggagagaaaggggagggacaatcagggtgtgaaacttagtgtctgaagaatttattaggggaaaagaactgtgcctctctgcttctgttaactccttgttgagagtccttgaactagaacctccctttagtcaccttcaatccccagcccaggattccctccttcaaaagacaatctgtttctatcaacctcttatttgtgtaaatatttatgtatatatttattacagaataaataatatactatgtaaatgtttaaatatataatatgcatttgtatgtatactacatgtgtatacatatttgtatatttaaatataaacttgtaataaatccataaggatggggacccaatttaattatgtatggtgtcctcacaatgcttggcatataaacacacaattaattcagaatttccaaccacaggagacatagagatgtaccttcccaggtatgtttacaacatacgttcacagatgaatcaaacatggaaaaaaaaaaaacacatctacttttatgatatacttgattattctcatgttgaccagaaggaaaaaaaaagaaaaaaacacccaaacatatggaggggggaaaagcaccagattgggagttgagtcctggctctagccgagtgtgatagctcacacctgtaatcccagcactttgggaggctgaggcgggtggaccacaaggtcaggagttcgagaccaacctggccaatatggtgaaaccctgtgtctactaaaaatacaaaacttagctgggtgtggtggtgggtgcctgtagtcccagctactctggagactgaggcaggagaatcacctgaactgggaggcggaggttgcagtgagccaagatagtgccactgcactccagcctggcaacagagcaagactcctttttttaattagctgagtgtagtggtgtgcacctgtactcccagctactcaggaagctgaggcaagaggatcgcttgaactcaggaggatgaagctgcagtgacccatgatcataccactgcactccagcatgggtgacagagtaaaactttgtctaaaaaaaaaaaaaaagtcccagctctggtccctgatcttctataaattaactatgtggccctaggcaagtcattttatctcactcaaccccgtgtctcttgcctgtggaacggggacagtaatcctcatcttgcatttctaatagattgtcaaacaaatggatagaaagcccattggaaactacatcagtgaattaatttttaaaattcaggtggaggatgaattgtaaattgcacagtactttaaggacaacaaaatgaaaaagaaaaaaaaaagttgtttcaactgaatgtcacacctcatgctgcttttttctttcttttcttccaggactccattcccaactcacctgacaacgtccccctcaaaggaggtaagatcttggaattaggtgtaaatgtgtagtaagtcatctagataaatgccataaagtgtgaaacctgattatcaaccagaaacaactctatgacatgacccaacagtaaagtgggtaggggtggaggcaagggctgttcaggactgagctgatgcacctgaattcatcttagcagctcctgaactcatccccacaagtctcccaccagctcttgacactcccactaatgaaaattctacctctggcataggcaggactgcaaggcagtgttgtgttaaatgcttgaaacctgaaatcagataaatgggggaatgaatcttggcttgacttcccactggggagcctcaactcctcatctgttaaatgggaataataataatactcacctcatcaaggtattggagaagccattcagatctcatctgtaaattgcttggcatggcaaccagcacatagtaatcattaaataactagtaatagctaaaatgcataatgaagtcaaggacttgtgaaaacagacttcctcctcactcctatatttccaatcattgaagtcactaattaacacgtcgtctctactagcctcagagagatgatatgccgagttcagttaacatcgatgatgagaaattttcagatgacctgattaatgtttttattgctcagagaaggaaaaggaagacccagagagggaaagtgaagtatctcgtccaaggtcatacaaagccaagcctagaacccagaaagatgtcctcatctctgatacagtgtcttttctgcccaagaacaccaactcccatctcagtcctgtaacctttagaacctagatggcaaacacagctggatagccagaaagctcagagcaaaaagtaaggaagtgagttaatgtaggcaccagggtagtggcacaagagtgtccttgagaccagaggacacagatgactggacacagctcctcacactcacagcatcacacttggagtgtccttcaagtttcccttgcccatgcctttcctgtggtttatcacccagagacttcaaaaataggggcaaaagtccccaaaagacagggattctggatctttcaaggcagactaataatcatagccttgtcaacaatatctcattttggctggaattacttagcatgtgacctcagttcctaccatgtctatgtaaacagtcacattaatattaaaaggagcatagtagaatgcaggggtaagcaaactttttctacgaagggccagatagtaaacgtttaggctttgggggtcactatgtctctgttgcaattagtcagctctgctgttgtagtgctgagccaggctgactacacgcaaataagtaaccacggttgcatttccataaaacgttatttatcaaatgaggtggtgggctggatttggcttatgaattggaggagtcactgcaggctttggagacagatgtttcagttaaacatgtaatgcacgttcacacggagctttggaaaaaccaaaaggctctgagtgaatataacttgcccctccccactcccactgttccaccaccacctccacccagactttccaaggaagatggaaacttttcattttttgacagggagaagggatttttaacatgaacacggtctcagtgacgaggatagttttgattaggtaataagaccttagccattctggatctcagtttcctcgcctaaagagcacttcaatgcaaagtcgccaagcataggggctctaactagtattctggtaccataataaagttgataaagttttcatcagtccaaagtgaagtacaaaaaataaggacacggtagcccccttttcacagggccaactatatctaatgtaagaggcactcttcctctgagacggtccttcatttttgtgtgtcaaaatgtcctttttttacaacatgaagttgatatagacaggagttaagttggcttgttttttgccagagttattttgttttgttttaatcatcacaataggcaaaataaaaagctgtccacttcatattggtctctgaattttcattctggggagaaatttcctgggtctataaagtccaaacttttcacaaccatggacgaaatcacttatcacatttcttcttatctggaccatgaatgggaatatcagaacacaaagtaatcaaaaccaacctcagtttacaattcaatgtttccacaaccagatttttttaaatgctaataatattcggttggtgtaaaagacattgcagcttttgccgttatgttcaatggcaaaaaccatgattacttttgcaccaactcaataatccccatgggactgtgaaacttttgttaaagaccttcccatacctcctttgggttcattctcacctcaaccctgtgagcaagccacagcaacatggggaatagtcttcccattttgcagatgatgcgctgaggcctaaagaagccaggtgatttgcccaaggtcatacaaggagttaatggccaagtgagaatccggggctcctccctcttctccctgcatgaccggcttccaccatgagatgccagtgacctgctggaggcagtacctgactttctcttgcttttaatgcaagtcaacatccccttaattcagcaatctgcagagacactgtagtagggtgaggtagaaaaaatattcctgggctccagaactgaccacatcaacaagtcttttctcctctctgagcctcatctgtaatataacagcaatgtactaaatgccctggaggagtctctccagctttgaccctttatgagactataattcttttgtacaatatgtaaaaatagaagaaaaaaaacctaacaaaaatctcaaggaaatctgaagtcacagcttccttccccaacgaacccagcttaaacaggcacagaagcagtaaattgtcccttttgaaaaaagccattgcaagacattccaggcagaggggaaccatctttcaggtactcttgggaggaagcttcaggggcagcatgtggtttgtcactagaaaggaaaagggcagaagctagacaccttctagggagccctttttcactggctgttgaaaatcttccaccatcagcagaaaatcagcagtggctcagagcctgggatgtagagctatgtgcacatgctaaagaaaaaacacaggatacacttcgctacagaggaaacaccaaaaatcaaacccttttgggtaatgaaaggatttctgagtcctatcacaagcttcccattcctggccaggatagcccccagccaactgacacctcacaggcagtaagccaggaagagcgcctgggaggagaacctttcccccacacccttctcctttctgggttttagttttctcacccagaagacagagttaataatgatttttgcatgaagccaccatgaggatgaaatgggacagcaattggaccctcatctgatacctggttgaacctatgtcctttgggcataggatccactctgttctttcatatccagataaaatgttcccatctcatttcacaaatgtcacggaaccaaggagaatgttgtaaagagagtgaagctcatccttctcctcatcactccttgtttcacttttctgcttccaccaaattttgaatctcatgtctgcacatggtttctggcttatttgcccaaatcagagaagacagccacttttgccttgatttccaagtttgaatagtaacccacatttatgaatagcgacatctacagaaggatttggggtatgcagagaagctggtagggcagtgtagcacatcccagtgcagcccagcagatgacacagaattgaatattaggtccctctgttcttgcaagacctcagctattccagccactgggaatttctcaagggacagctatcctccctggggttcagccctctgacacctgaactgactcactctccttcctgtcttaatgtccttctcccatttcccctccactttccacttccctcataaactctgcagaaattcaaattgttctgactttgatttgcagaatgattctggtcctttgatctcacctctgggccttctcaatataccctggccctttttataacaaatcaccccaccaaatgatagctcttacctgcactagaagaattctgtagtcagtgttctttcttgtactccctcattgcatccgtatgaggccacggcagagtgagaataatgaacgttgacaggcatcactatgtgccaagaattggctgagtacttagtaattcactcatgcagttctcacagtaagcccccaggaatcataattagccccattttataggtaaggaaactggagcacagacaggcttgttgccttgcctaaaatttcagagctggttaggaggggtgagacctcaaatccagcgtatccaccttgcagcccttgtgcttagctgggattgtattgtagaccatctgggaaaactcagtaccgcaaatccttccagtgcccctacctgctggccaagtctacatatccccttccagggctctatcagctctatcacttcttcggcacctgcggcccccagctcttggctttcatgtctcagaagtgcactctctgttaccaagctcagggtcacagagggccacacgcatgggtttgaatgaggtgaagtgctgaggggaaacatggtccatggcgagggttctagaggctgaatttcagctctggctttgcagctgaagggtcatgtgccttgggacaattccttccccactgcctaccagttaagacagatttgtctttcctacaaatgtaatgtagcctccaacacccaaaggttcctggaggccctaaggaagttggaacagtggatagacctcgtgtgggtcctgacaactccaccctcgcctgaattcagtctgtagccaaagttggggtatgaaatgcagaggactggcccaggaatttggaatgctgacattcaagtcttgggacttgaagcaattcactttccctctcagggtcttgggtttcctgttttctaaaatatcagaagtgaggggaacaagccagatgtcctaaccctgagatggattttgctttgattatagcgttctatgaatcaaacaaatatcttaggattctttgaccactttaacattctaacatttgcaattttataaggcgtggcagctaccctccttgcccctccacttgctaaaaagaaaatggcattaaagaagacgaagtgaggttggctctctaattttaccaaatgaacccaccccaaagaaacaataaaagctgcaccttgaaggcagtgacattaatccaagactaggttctcactaagacccaactatccctcatgtcccatggtcacaatcagatgacagccgccctagcggaacaccacactggaagcagtcaagaggcaacgtgcactttgggaggctgaggcgggtggatcacaaggtcaagagatcgagaccattctggccaacatggtgaaaccctgtcttcaaaaaaaaatacaaaaattagctgggcatggtggcacacgcctgtagtcccagctactcaagaggctgaggcaggagaatcgcttgaaccccagaggcggagattgcagtgagccaagatcgcactactgcactccagcctggcaacagagtgagggagggtaagggagagaaagcaggcccattccttgaaattgttttgttatgtatttcattcaaactatctagacacaacatgtgttggcttaagtttctacatttcaagcagcacaaaccatggactagggcacaggactcaaccactgtttggtatagtttgggtggtagacaccaggctcatttttatgcattatctcatttaatcctctctacaactctccatgacagttattttattattctcacttttaagaagaaaacaggacaattcaaagaggctgcatgatttttgcaaagccacacagctagtaatggcagacgtggaatttgaacataagtctgtctaactttctaaaattgatttgaacccaaaacgaactttctaaaattgctgccatacttttgcattttgaacaggtagggagtgtttttttattaaggttattagaatgttagcaaaatttaccctatgtctccagactcacctttccttttaaattatagactttaaagatgcttcttacttacccacagtaatgtcaattcaacctgtgtttagtataaatgaattccaaggaaatgcccatagtgtcagacaggtttactaactgttgcagatacactgcaacaagtcaggactgaaaagaccttaacatcccaaggaaagtaggtggggcagggggcggggggaggcaggatttaaattatttaaaggaattccaacttgaccttaatttatatttactgatcacttcctatgtgctcagtcagcactaagtgtgttcatatgggcattctccaaatccttttggaaatcagggtcacctagtggtcctttgtttaacaaatggtccatcctgcagtttatctctctattactagttggcttagtgatatcaaggaattggtcaaaagcctcaattacttttgcaccaacctaatagttgaaatgacccttgctcaggttaaggactcactttgaatccaaattttatccagaggggagagactgtcctctagatgtcactgttgggactctcctggatattgtccctgaagcctggaatgaagaagccagggcatggcagatgcagagtcattaggataatccctttccttcttggaaggattaaaacatttttcaacaaatgtaaagaggattcagcacacattcctggaagcatcagatagccttaaacacttaggtacttaattgagaagctcccgtccatcaaataatgtcatgagcttcattttaatgagcatttcatctgccaattcactctgctaagtggcattgctaaactgtgccactataacaacaaagaaaagaggagtaaggcagaaagaatctactttactgagtgtctcctctagccacaggccacactgatcacttgacatccacggtctcattgcatcttcatgacatccatacatttaggttgattgttttaattctcacttaatggatgtggcagctgaggctcagtaaggggaaatgacagatccagagctaaaagctatgaccagaattcaggtgctctttttgcgatgcatcgtgtcttccttgttcttatatcaaaggtgctgtacatctggaaggtacctggcactcaaaccacataccatctggccgggatggttggcttggtctgttttgccatggtagagccgccttgagcatatttgcatctttatgtgcccatgacttgtaacttggcagtgttcagcacatgggcctgaagtcatctgctggcattctcccacaagatggaacccaggagctcattagtgcttgttttcccagcacctccagctgtcttgtcagttttcagttccagtgtctgtagtggctgcaaacccacttcttcctgcatttaacccttcctattccacaggaatactgaaagtcagagaagagccctggattagaagtcagaagccctgtgttctgaacccagctccaccatttacctactgtggagtcttgggccagaccctagtctctctgggtagtctcgccactcctaaaactaggatctctgttagcatggcatttagtgaccctttctgtctaatattgtgaaatctcaaggtgagagctagtcttaaggtttccataatcttgaccttctagaatatgctcctttcaccacctcgagcaacctctctttctatctctctcctctgtgtgaaactggccaggagggttttgttggcacatctttctcttcagcctctcaaacaaaaccacagaaagtcccatgatccttctagaagaggctaaagcttggaaagatgatttacaaagctgatgcatctgaaagctttggtcctcagggaagttcaggcagtgctagggttgtctgaaagatagactgccctacagaaagagtaaggagccctggtctctggtcctgtctctctcactaactctctggatgacctaggatcagcctgccataggggcaacattgaggagcacatgggttatgtgttcaccaagcctgaaccaggccatctcagggaactttcatttctccaaactatgcaaatccttacagaaccagactattcataacttagattgtcctcagagctaaaatattctgttctactactgcaggtgtctgaaaacctgaatgtgtgaagacacagtctcctaccttgggtaatgcaacatgcccataaagatagacaggtgcagctgggaccgactccccatcccaaaccttcccacccccaccaccagcaggtctgataggggatggctgagtctatacagcctgctgaaataagctaggtaggccctttaagacagatcatcaaatccacactgctcttcatctattatgttggtgcagaagtaattgcagtttttgttattgcttttaatgccaaaaccacaattacttttgcacaaacctaatagggacactagagcccagagaggagaaatcccaggattctaactcccaggtcatcaactcagccgtgacttgcagacagttctcacttcccccactctgatgctctgttcttcaaactaaacctctccaggcatcactttttgctccctctgctcccagccttcagaattccagggacattgcagaatttcagctgcatgtaatgccactatttataagtcacgtttttctgtcttcataaccaaaaaagaaagttatatcatagactcacagggtgatgagaagactcaggccacacggctgatgacccatgaaatgttcatctagctcttgataagagcctcatgacctccaaagcagcccacctcttttttgagcagcactgactggtcaactctgtgagctgccagcactgtgactcacagtgtgacataggtgtttttagtgtacgtctttccattgctgcatctgagaaatggggattagagcagtgttagctcttagctgagggcttcatctccttcctcttccacttggaggtttagtgcttgggccccacggtgtgccgacagcctcatcaagcattaaaggacagaggctgtgcccttctctggggtcttctccaagtttaacagcccattccctcaatagctcctctagtgtcctgcttttagcccctttctgaaccagctctggcaacatcattcctaaaagggctgcctgtgtttttccctttagctagaaaccatctaaatgatttttaaagaaaaactaaaatataccatgccatttgacttcaggaaatgcaaatgtttcaaaataaggtgttttttttttccatcctcgggtttctcagaattacaactgaggtcaacccaaaggggaaaaaacaacaaaagaaccagaacgtgtgagaggcaagcctgggcttgcacttctccagccacctgtttacagaggctcacctgccataaggggtaaggagaacagtgtaagagggctttcggccaatgagcagagcctgttcttgatgttttgtgctggcctcagcccaaggcatgaatcttatcttcccatctaatctagcctgacctgcaatgccagtgggagaatgaggccctgtgttattctagccctcaggcaaaaggcaagccaagcgtcctgattcacctcactgttgtcctaagtacttactctgtatccacagagggaaacaagaaagatgaactaggtgattcaattcaacaaatatttacagagcatctgctagactgggcagtgggggtttataaacaggagtctctgccctgagggttcactgtctgatagaatgggcaaataggcaaaggaagtatcctggaggagctgactgctaggctgtgtttcaaacaaggaaaaacttgcctggtgaaggaggcagtccaggtagagagcccagcaagtgccaaggtgtaatgataaatcaacattcctaaatggtatgtttagggggactgcaaagccccaaactcccggacagcagtcaggaatccattcgggcagcggtcaggcagcctgagtttggatctctactccacccctgactacctgtgtgaatgtgaacaagtcagttaacctttaaaagggtccatttccttatgtacaagatagacttaattatggtacctctcttatcgtgttattgtgagaattaaatgaaataatgcatgtagcatacttagcagagtacctggaaaatggctatcactcaacatgtattagttatgaccattcatattattatcactgttcctcctcgttattattactattggaacataaagggaaaggggaggagggaaggtgaggggtgagaccagagagttcagtaggagtcagaacaatggggaccatgaaagccatgctgaggagcttgggcctgatcctgcaggcgaaaggagtcagaaagggcttccatgcaaacagacagccaggtctgtctccctggcttgatgttctgcagcttagagtaggaggctacgccaggaggactctctaaccatagtcacagtccattaggagcataagcagccattagtgttggggttctgactacaaaccccaagagtgtgggctgtgggctgcaacaggcaggaccagagcactgatcagaggatgcatgaggatgaaaccaagggaatgacagctgacccactggctctcaccaccaagagagctttggaccagaagctctatgtggatgcagcagataaggaggaaaactgcccctgcttctgcccggagtgcctctcgcagtgagcttgttcagacagcagagggaactcttcatttaactttcaaccactccaaagcccccatgaagctatgaggatggccaggagggactttctcagggctgggcagagactgcaatgggaaaggttgtgagcccagcaggtactactcggcaatgcagtgagcaaatatcccagggtgtggctgctccattgaatgggccgttggctgcctaccgtctgatggatggactacatggtcatctctggtgacatctttgagaagatgtccatgtcaggtcaaagattgtccagttttacacatggggaaaccaaggatcaaagaagagattagctctgaataagttgaattcaagtgtcattgcaggaaatgtataacttgaatctttgcatacaaaatattaagtagttactgtaataaaaaaaagctaagccaccatcactagtgaatatatgaaaaatatttttatttcttaaataccataataacataatattatgtttgcctctgccaaggaagctccaaatagcaggacttctgttaagatttctttaaccctgtgtcctcttaaaattgaacaccaagatgtttttatcttcgttgtctagcaaaatagcctagaacaggaaacctggcctctggaattagccatgggcaattccagcatttacacaaacttgtctgaacttaggcgatggtattgaccacctctaggcatcaaagttaaccctgcaggattagtctgagaactagattagctgatatattacccagctgtaaaagtacccagactagtttctggtgtgtggtagataagttgacagtatttactatcagtattatcattctcactaccactgcctggcaaggcaccacgaaacaatgtatttcacctgcgtggcccccagatttttttcccatctgtaaaaggggcttaataatacccctctcacagagttgctgcaaagattaaggagatgaaatacgtatagtgccaaaaaatggcccctgacacattataggaatggatgtcatatttgtttccttccctgatttccacagtcttccataaaagtccaagtggaagcaatcaataaaaataaatttaaaaaattaaaatcctaaaatacctgatggcaaaatgagaaataaagagcttttctccttattctgaaaatggaaaacagaacggtaattgtctccatcaaagtgttgtagaaaaagatcaggtatttccagatcccaaaacggcaaaagacattttaatgcatcgtctccttatttttaggaaattgctcagaagacctcttatgtatcctgaaaagggctccattcaagaagtcatgggcctacctccaaggtcagtaaccaagcccaggaaacctaaacatatgaaaaccgcttctgtggcttttcagcaacttttaagccagaagtcataattagagtcccatggccaaatgtgacctgcagatgtgtactgtttagtctgcaggaaatttttttgtaatttgaatttgaatgtcttagcggggagagcgtcattctccaaagctacaaggcttctctttcctcagtcccattcactcctttatgttgcctacctggcctctgtgggcattcatggtccccaccaccactgccaccaccagccccacccctcacccctcacccctccttattcagctacctaccaatttcagcaaagtacacagtccttttcctaatgcaagggaggcaggcacttaatctctgcctctatgaagttattcacaagggaaccataaaattgccttgtccccagattgacagcttaatgaacatgtcagcacagggccgatttgcatattgcagtgtgcttcaggtaagaggccccttacaaatgaagcaataagaggcactttagactgcagagtgagaaagagatggccaagattctctgaatagccatcctgctcattttaaaaattcaattttgcagttagattagttctcactcttcagttgaattgcaacgaggtttaaagggaaagcatggaagcaattaaaactagcatgccagcttcctggccctgaaagtcacccttaccagtcagtgctaattttcacgtgttaggacttagagactcaccttccaacacaaacttgtcagcttagagggtctgctaattctctgcttttcaataaatcccagatggcaagagccccttaataagcacatgggggacctgcacaattatttttggctgccctttgaagggaaaaaggcattcaaaaattcagacaatgaaccgttagaggatacatcttaatgtgaaaattaatggcgattctcctggacatcttcaaacctaaattggatattaactgaataatattattgaatgtcctaccttgtactttctgcaatgcctatcaaactcaatattattgaatttcctatctctgataccttttgcaatgaccattcatgataaatgaacataatagttccaatcttgtggagaacagagtccaggagcttatagtctgaaaagggaaagttcatcatattcatcatagaataatataatatgataatgattcagtggaaaaccattctataggaggtagaagtaaagtaccatgtgtgttctgaacctccagctttcagcattgaagaaaaggaagaggggtggttttatacctgtgccttgagtaataagtagactctagagggagtaacatggaagatattcagatgattggaacattacagaaaacatgggtcttgaatgggaaactttgaacaaagacttagaattttgcaatgcgtacctacaatcttctcaataattctgttttctatacttctctttctagtggcaaagcatctaaacaaaaccaagttgtcttggaacaaagatggcattctccatggagtcagatatcaggatgggaatctggtgatccaattccctggtttgtacttcatcatttgccaactgcagtttcttgtacaatgcccaaataattctgtcgatctgaagttggagcttctcatcaacaagcatatcaaaaaacaggccctggtgacagtgtgtgagtctggaatgcaaacgaaacacgtataccagaatctctctcaattcttgctggattacctgcaggtcaacaccaccatatcagtcaatgtggatacattccagtacatagatacaagcacctttcctcttgagaatgtgttgtccatcttcttatacagtaattcagactgaacagtttctcttggccttcaggaagaaagcgcctctctaccatacagtatttcatccctccaaacacttgggcaaaaagaaaactttagaccaagacaaactacacagggtattaaatagtatacttctccttctgtctcttggaaagatacagctccagggttaaaaagagagtttttagtgaagtatctttcagatagcaggcagggaagcaatgtagtgtggtgggcagagccccacacagaatcagaagggatgaatggatgtcccagcccaacctctaattcactgtatggtcttgatctatttcttctgttttgagagcctccagttaaaatggggctccagtaccagagcagctagcaactctgccctaatgggaaatgaaggggagctgggtgtgagtgtttacactgtgcccttcacgggatacttcttttatctgcagatggcctaatacttagttgtccaagtcgcgatcaaggactctctcacacaggaaacttccctatactggcagatacacttgtgactgaaccatgcccagtttatgcctgtctgactgtcactctggcactaggaggctgatcttgtactccatatgaccccacccctaggaacccccagggaaaaccaggctgggacagccccctgttcctgagatggaaagcacaaatttaatacaccaccacaatggaaaacaagttcaaagacttttacttacagatcctggacagaaagggcataatgagtctgaagggcagtcctccttctctaggttacatgaggcaggaataagaagtcagacagagacagcaagacagttaacaatgtaggtaaagaaatagggtgtggtcactctcaattcactggcaaatgcctgaatggtctgtctgaaggaagcaacagagaagtggggaatccagtctgctaggcaggaaagatgcctctaagttcttgtctctggccagaggtgtggtatagaaccagaaacccatatcaagggtgactaagcccggcttctggtatgagaaattaaacttgtatacaaaatggttgccaaggcaacataaaattataagaattcactataccttcccctccctggaactcaggatccaagtctagaaaatgaaaggactgggtttgaattgcttcaaaacctcttccatctcagaagaccagaccctgggaactgagattccagacacaattttggaagctctccaaccaaaataaggcccccctaccccagtatataattgaagacactagtaacacctgactgcatctcatctcagcagagccagaatatggggacaaggttcagggtgccctgctgaatggtgtgaacagcaggatctcaaggatgtaatggaaagaactaccacactgaccatccagaatctaagagaccatctgggtgtttgggaaaccatctgacgaggcctgactctattccagttagattgacaataattgagcagcaggcatttttcatttctggtcaggaaagcattgtgcctttagcaaacaatcagtgtgcaacagtgatgtggtcatctagccagggaatggctgctccatcccctgcataatatattcctgcttcaaacacctctcagaaaaccagttccgcgagggtttttatatccccacaaagttgttgagagacaatgatgaccctggaagtggggaggaggacttctgagaaacagcaacctctctcctgattggggtagccatgagatttctctagctatatccaacttggcatctgtacatcatctttggaggaacatcttatttgtggaaggaccttgacaagccgtttgagatggaatgtaggccctgatgttatgcttcagtaaaaaaagatggaagcttccctgctataccaaaacatggagcaaaatttgcatttttctcaagaaggagagaaaaggagtaggactccagcaaagtttgtcagaaggaaagctagaaaagatttaaaagaaaaaaagaaagaacaaatcagcagtggtggtatggatgaaagggacttgagagaacaaaaatggctaagggaaaattttaagtcatctgctgagcagtgtgctgtgtcaacctcctcctaggtctcctctatgaaatatttagtaaagtctacatttctctttaactctttctgtgagtagattctttgggagaagcaggcattggaagaggtgttgaattcagcaagccaaatggtctgtggtaaaaaacaaaacagactttgagactcaaggctaaaaaaacagggaaatggctggcatttgagtcacacactaactgcataggacaaatgaatcttgcttaaaccaactcatgcattcttgaaaaggtatatgcaacccaactgtgtgttaactaagcaatttttttgccatctcacattctaactcgagaaagattccattttcatttttcaccaactgttctctgagcagaggtacctgacttttgcactgtgagtggtttctaatctcagtctctgtcaagcaatgctaagaaagccaacacctaaagacacaaggggtacatcatttaaatgaataatgtaaccaaacaaacaaaaaaagagaataatcattaataactcaactgatagatatgtagggagtaggcaacccaggaagtttaaaactaaattctgttactcttgagggttaaccagcccctgggaatgttatgagcaaatgatactccatgagtaaaatgatatctatgcaagtaaaataaataatttatctaactgggaactcaggctacctaaaacatatgcctctttggtaaaaactcaacttgagctccttcccttgctcctaccctctgaaccccacctccccaccacacacacacacacacacactcagtgtacttgcagaacttgtagaggaagatggtaagtgagctcacaaaaacataacaagtcaatgtagagtcatccaaactggagtggagtggtgctatcttggctcactgcagcctccccttcctgggttcaagtgatcctcctacctcagcctcctgagtagctgggactacaggcacgcaccaccacacccagctgatttttgcgtttttagtagagacgggatttcaccatgttggccaggctgatctcgaactcctgacctcaagcaatctgcccaccatggcctctcaaagagctaggattacaggcgtgagcaaccacacctggcctctaacccttttctgaatcatatattgaccatgtactgagtctatagaggatagagaccacctgtgtctcacattcaaatcaccatcccagagtgaccggggcgagagcagggaagagcagaggaaacctccaaatgtggggactgtccaaagtaaggttggaaagacgtgacctgaggaattgcagaaaggctataggaggccctatcaaggctggtgggaaataatggagattggaatatgagactgggctcaaatgccagctctctcactaaccacactcgaggacttcgcaagtgtctgctccctgctgggcttccaaccaatgggacttccatcaagcctggcagatctctcaggagtgttctagagatgatacaggctgacttctccatcctcttaatttaagggtttgtcccttccatcccagaataagtggtattcctggaattgtgggaggctcccttgtctgacagattctgccagcttccctcagcacttcctccttttagttcttgtccacatcaaaacctcttagggcactaggctattctctgagccatcctttatgtgactggagattctgagaaggaattagatagtagagttattgtagagtaactactatatatttaattgtttgaatataccatagtttgtccattcttctatgcaagaacatttaatttgcttttaggtttttgctgttacacacaaagctacaataagcacatcttcttcttgcacacctcccacccctagttgccatttttctatacagcaaaaatactcttggaaaattataaatggtgtcacaaagacactgagttaaccatggctagcgagggtttagacacctctgtgatcagagctcatgacctggagcttagtctctggaatctgaatggctccttccatactttctaagtacttctctgctctgtacattcattcaacacacatatcccaagtgccagtgagtgccaggtcagtttacaatccaacatggtatgtgctacagctctgccaagccactgcgaaatcagccctcattagcataggtttgaaacatgcctttcaatgcactctggggcttccctggatctagctctcttcctggagagtaaacaaacaccagaaagcatgaaggacaagcacagctccagaagatttctcccccaagatcaaatgtctgtattcctcatgggctcttctcacaattctcccctgaaactctgcgatggaagattgtcactcaatgtatagtataatgactttccaggttttttttctaccatgacccagaagaagaaaggtcatgttgccaacgaggactaagaaaaaaaaaaaaaaataataacttactgtgaagacctgaattgattttatgatgctctcttaagtcacaacccacatttccaaaatactattctagtgtgccttctcctgctccacatgttggaatgctaaaaatatactttccttattcttttgcagctcaggctctagtattatttagtctgaaatggacagaattttggaatgtttgtccatccagctagcaaggacagctgtggaggtgtttggtttttctgcagcttcgtttgcagaggttttcatgttcaaatacgagcttagtagttggggtgagcctaggtggtgggggagaagcatccgttctgctgatgtagtctgttgcagatgtgcactggttctggagcccggcagcagtagcggcttcctgattgtagtggtttcctgttcgcggcagcagttttgtggttctagaggggcaggcttcctgattgcaagattattgaagagacagcagctactatagcagcccagttcctaggagtcgcattataggtttctcctgaaagctcaatctcgattctgtttcctcagacctcctgacaattctacaagccatttaacaccctgtgataaaccccttcctgccaaacaagctaacgcgaagtctgttctctgcaactgattcctcatgaatataataacaacatgtacaaactgacctcaccattatgtacaaaccaaccccaccatactcatcctgaacttaacactattcctacattccaaatctcaaggactatctcagtctctgaatatccttcttctcacttcctactcaattaacacccaactaattcctccagtttcctagttccagccaccactctcaatacctcctaactcacagcactgcctccagtcttactccttataaatcccatctccagacagcaatagcatctcccgattgttcttggaattgatagtgataataaccatttatcaagctcttacatgttatgacttttcctgcactcacttatttaatcttcaaagcaatccaacgaaataggcatcattgagccaggcacggtggctcaggcctgtaatcccagcactttgggaggtcgaggcgggcggatcatgagatcaggagttcgagaccagtctggccaacatagtgaaaccttgtctctactaaaaatacaaaaaattagctgggcatggtggtgtgcgcctgtaatcacagctacttgggaggctgaggcaggagaattgtgtgaacccaggaggcagaggttgcagtgagctgagatcatgtcactgcactccagcctgggcaacagaacaagactcttcctcaaaaaaaaaaaaaataggcatcattatccccattctttatataaggacattgagagtctgcgatgttgaggagcatggccaatgtcacagtcaatggacggtagagttgggatttaagaccaagtttgcctaactccacattccacgctccagtcactatgaacatagccttcctaaactctaagctctttccaccaggtctctccctatctatctcctgaatgtctctctagttttgtgctcagccccacctccttgtgctctatgatcaaatcacattgcactccttccagttcctccaatcttccatgctctgcctagccaccagaagcttgcagataattttccttctgcctaggatactcctgtcacactcttttgcctgattaactcctatcattgttctgatttccatttcaatgtcacctcctcagagaagtcttcctgactctgctggcttcacttaatgccttgctgtcaccttccatgcttccccatcgttaattgcatgacactttacccttcacccctggttctctctatcattcctctccaacattcaaattcccagaaggcaggaaccctaccaatcttatttagcactgggtaatcacagcccagcccaattcctaggacatagtagatggccattcaatacatatttcttaaatgaataatcaaagaaaaccactttaaacataagtccgttttaaggaaaagatatcaagccataccaaaacaaaagaaaaaaaaaaacagttcttttcaaaatatggaaatgttcattgaaagcctctatttttcttagaaataattttcaggccggggacagtggcttatgcctgtaatgccagcactttgggagggcaaggtgggtggatcacttgaggtcaggggttcgagaccagcctgaccaacatggagaaaccccgtctctactaaaaatcaaaattagccaggcgtggtggcacatgcctgtaatcccagctactcgggaggctgaggcaggagaatcgcttgaacccaggagaaggaggttgcagtgagccgagattgcaccactgcaactccagcctgggcaacaagagtgaaactcaatctcaaaaaaaaagaaagaaaaaaagaattttcagggctcaggagataagaatgcctattagagaaaggtgaaatttttagaaagcagaatctacctgtgccatctgagaacatggaaggaaaaaaaaataaatctttgcttactttattgaaccccttttctgagcaaggtgtggtatatttgctgtagaatccatcacccttcctatctctgagatatctatatgctattctagtcattttgtgattagaaatagtgagattaaccttagaaagttttttaagttttattttatttttgattgacacaaaaatagtgtacatatttaggtagcacagtgtgatatttcaatacatgtatacattgtgcaatagtgaacatatcccttactttaaacagttatttctttgaggtgagaacattcaaaatcctctcttctagatattttgaaatacactagaaagtttaaatcaaaccttggtataccttagaatcctgaaatcccaggccacttcctagagcaattaaattagaatctctggatttagaacccaggcatcaggattattttaagctcccaaatttaagccaaatattaagagtcagtggtttaaatctttgctgttatgtcctggtgcctggtatcaccagagagcttgttaaaaatgcaggcatctcatacatacctaaaaactggaacagaatctgcattttaatatgatccaagagattcaggtgcaccttacaatctgaagaacactagttggttgactttttctggtaagtggagaagattgctggtaatccgttatgtttctctgtttcccccaagtggactttcatgaattggcttggtcttccttgtctgctgcttatgcaaatgtgagggtctaaacactacaaaaccatcaagtcaacgtgatggtattcatttgtaatgatcaccactgaatttttaacaactgcttttgatccaactgtctcccttgggaatattgggcaacactaggaataatctggacaacatgttgaaagctttggatgcagtttagaaacttctatgggggctgtactttccctatagccaaggaaagagaaaaaaacaagtctgagggtggcagatgggaaagaatagtggccttggcaactggaagccagtttcaatctgagctgaagcaattactaactctatgaccttggcaagtcacatggactttgtaaacttaaattttctcagctgtacaatgggaagctgttgggagaacaaacacatagaataagcttggaaagtgtacaactcttggggtattttatcatattcagtgtctgtgaaggagttagaccttggggagaggagtaggaaaaaatgaatcaatgcaagtttgagaaaagtgaaagttcctcaaatccactgaagcctattcccatctgcattcagaaaagccagccattggatcaacaaaggtctctgtcaggccaactctcaaaggatggtttcatcctgcagggaaaactggactagataaccaactgactgtttgcgagatgcagtatcaaggtcctctccctgtgcctctctagaagcagcactgattgcactgcaaatgaacacttttctcacttagaaatgagcacttagaagacaagaagaatccatctccaaatcccagcacccaaatcagtgtcctacacaaagtcagcactcaggaaatgtttagatttcacttgcaacaggaagagggaattaccaggcagggatatcagctaaactagtcaggaacaagctgatttgaaggctgatcctccttcacaaccaggaggctccaaacaaaaaccagctgaagtatttcatcatttcctttccattgctagggacgcagatgacctaacctccttgacattctgactatgccttccgttctcacaatgagtctcattttaccagctggcctgatgcagtcagcgcatggcacagtactcaagggaagaaaggtcacaatccatcacaggatcaatacaatgggatgagtaaacagcaagaaaacactgaaggaggcttcatttctaccaccaacattacattcatacactcacacagtcctcaattgcatctggtcttttcatcctcctcattcattactttgatgtgtttacttaaaccgctttatgttacgtaaatagatataattactatcacttactgaacgcttgcttgccaggtttcaggcaccacatggaagccttcaaatactgtagtctactgcatctcacccttatgagatagagatgaccattcccatgttgcagatgaggaaacagaggctcgaagaaatgcttaagtatgtctaagtttcagcagctcatgagctgaagagctaagatgtaaccactgcagtttggctccagagctatatttctaaccacactacactgcactaccctgaggctacttgacctggtgcctgctgattcctttgtccacaaggtccttgcccttcattcacatcttgttaatttgacctcattcataaaatttcaactcagacattattgctcaagaaccattccgctaaattagacatgcaacctggaccttgatattctcacttctgtctaaaaatttactacactcactatgacagcatgattgtacatttgcctccctgctaaactgtgggcttctgagtaacaacaacgtcaaaatgtatcacatctctcctgccgatatctacaaagtaaagttattctttcttccagattactgtggcatgatcctccaccattcacactctaccctggactctgggaagggacactgctgccttgaaactctacaaccctgaaccttgatgctggttgctgcagacaagaactgcttctaccctgggtcactgtcactgctaagtggaaagtcatgaacttgatggtaccagtcactctgggcctaaaccgacatagccaggaaacggttcaccccccacaaacagaatcatctagacctgtccatgatttggaatcgtggcccaatacttcctggccccagagagagaaaaaagtctgaccaccccctactcaaagtgccaactcatttccttcccagaattaatcacttcccaaaatgtatgactgtgtgaacatcaattcccttcaggggaaaaccccactcccacctctcaggctgtcatcttaccctatgaccccaacctgacaatcatgcaacagcccattattggtaccttttccaatgtttaggtgactcattcttatctacaatcactttgttgttctaggaaagtttttgacacagcaggcatttgatatatatttcttgattaaatgaaagattaaatgaataccatcttagatgtctgcatagtgctttaaagtttacaccactattctttcaaatagtacaagagagaactaagctgtgtactcaactgggaagaagcagaactgagagtgggagcacctggtattctgatttcttgtctagaactatactatattctgagatcactaaactacaacctcaggcgactctgcctacttttgtaaataaagttttattggaacacagccacattcattcatttatgtacagtctatggctggttttatgctgtgatggcagagttgagtagctgccccagagtccaggagctgtttacagaaaatgtctgatggacctgctatatattgctggtgactccaggtatgtttagatatacacacttacaacacacacacacacatacatcataaattttcccacaaagagaaccatatgatcactgtctatctgaccttttcaatattgtcagctgtgagaggggagtaccaactttgttggaatcatgtatagaacatgcctctgagtgctaagggattccatgggctaatgcatgatttttgaccatggacttgataatatctatccaacaatatgaagaagtagtaaacttaaaaaagaaaaggcctcagaggcaaatccaccaaaagcagtgagaaaggaatagcttccaaaaagatcatgttttaaaataaggaggttagagatgtgaggatttttttcttt

SEQ ID NO: 149 - DNA, 2084 bp, Homo sapiens
aaccgtcattttcctacgcgccctctgacatcagccaccttctctgtagctagtttctctgcacacaacttaatccctggcaatgaaaaatgaacctctcccccacccttgctgccgcctctcgcctcacgcccccagagaagagtttctccaccaggcagcaggtgaaggtttttttccaagtcacatgattcaggattcagggggagaatccttcttggaacagagatgggcccagaactgaatcagatgaagagagataaggtgtgatgtggggaagactatataaagaatggacccagggctgcagcaagcactcaacggaatggcccctcctggagacacagccatgcatgtgccggcgggctccgtggccagccacctggggaccacgagccgcagctatttctatttgaccacagccactctggctctgtgccttgtcttcacggtggccactattatggtgttggtcgttcagaggacggactccattcccaactcacctgacaacgtccccctcaaaggaggaaattgctcagaagacctcttatgtatcctgaaaagggctccattcaagaagtcatgggcctacctccaagtggcaaagcatctaaacaaaaccaagttgtcttggaacaaagatggcattctccatggagtcagatatcaggatgggaatctggtgatccaattccctggtttgtacttcatcatttgccaactgcagtttcttgtacaatgcccaaataattctgtcgatctgaagttggagcttctcatcaacaagcatatcaaaaaacaggccctggtgacagtgtgtgagtctggaatgcaaacgaaacacgtataccagaatctctctcaattcttgctggattacctgcaggtcaacaccaccatatcagtcaatgtggatacattccagtacatagatacaagcacctttcctcttgagaatgtgttgtccatcttcttatacagtaattcagactgaacagtttctcttggccttcaggaagaaagcgcctctctaccatacagtatttcatccctccaaacacttgggcaaaaagaaaactttagaccaagacaaactacacagggtattaaatagtatacttctccttctgtctcttggaaagatacagctccagggttaaaaagagagtttttagtgaagtatctttcagatagcaggcagggaagcaatgtagtgtggtgggcagagccccacacagaatcagaagggatgaatggatgtcccagcccaacctctaattcactgtatggtcttgatctatttcttctgttttgagagcctccagttaaaatggggctccagtaccagagcagctagcaactctgccctaatgggaaatgaaggggagctgggtgtgagtgtttacactgtgcccttcacgggatacttcttttatctgcagatggcctaatacttagttgtccaagtcgcgatcaaggactctctcacacaggaaacttccctatactggcagatacacttgtgactgaaccatgcccagtttatgcctgtctgactgtcactctggcactaggaggctgatcttgtactccatatgaccccacccctaggaacccccagggaaaaccaggctgggacagccccctgttcctgagatggaaagcacaaatttaatacaccaccacaatggaaaacaagttcaaagacttttacttacagatcctggacagaaagggcataatgagtctgaagggcagtcctccttctctaggttacatgaggcaggaataagaagtcagacagagacagcaagacagttaacaatgtaggtaaagaaatagggtgtggtcactctcaattcactggcaaatgcctgaatggtctgtctgaaggaagcaacagagaagtggggaatccagtctgctaggcaggaaagatgcctctaagttcttgtctctggccagaggtgtggtatagaaccagaaacccatatcaagggtgactaagcccggcttctggtatgagaaattaaacttgtatacaaaatggttgccaaggcaacataaaattataagaattc

SEQ ID NO: 150 - protein, 234 aa, Homo sapiens
MDPGLQQALNGMAPPGDTAMHVPAGSVASHLGTTSRSYFYLTTATLALCLVFTVATIMVLVVQRTDSIPNSPDNVPLKGGNCSEDLLCILKRAPFKKSWAYLQVAKHLNKTKLSWNKDGILHGVRYQDGNLVIQFPGLYFIICQLQFLVQCPNNSVDLKLELLINKHIKKQALVTVCESGMQTKHVYQNLSQFLLDYLQVNTTISVNVDTFQYIDTSTFPLENVLSIFLYSNSD

SEQ ID NO: 151 - DNA, 64482 bp, Mus musculus
  misc_feature (1)...(64482): n = A,T,C or G
gttagttgactatgttggtactcctgtggagtgtctatcccttttgaggcccaaaatcctttcagatcctattcttccccaagagttcccaagctgtttgactgtgggtatctgtatctgtctgagtcagctgctaggtggaacctctcagaggacagcgtgctcctgtctgcaagcataacatattgttattaatagtgtcagggtgtttgcccatgggatgggtctcaagttgggctggttactggttggccattccctcagtctctgttctatcccccatgtctgcatttcttgagccagggtaaattttgggttgaaagttttgtggttgggctggtgtctctattgttccactggggttcctgcctgattacaggaggtggcctcttcaggttccatattcccaatgttgtgagtcatagataaggtcaccccattgactcttgggtgcctcctttatcccaggtctctgtcttctcctggagatggcccctacctcctcaccttggtcagttacagatttccattcattttcatggccatctagttatctctcctgtccttctccacacataatcctgatataacaccaccatcccccaattcccttcctcattccccactacctcccaggtctctccctccatctgcctcttaggactatttcattcccctttctaagtgagattcaagaatcctcacttgtaccttccttcttgtttagcttctttggtaggcaaaaagagggaaatggtgcagaatattttatcacattgtgaaccccaagactgtggactggaagatcctgtttcttgttgtggtgttgttcagtcctagcacacacctttaatccaagagctttctgtaaatgggattaaataaagtcgaccatagctcaagaggcagagcaagcatcagctgacaggaagtgaacataagaaaacacaggaagtagaaaggagttaaagatgatgtaagacagtgtgggggagcaagagcttttccttctgggacatcagaggggtaggaaaggcagttgggtgctttctctgcctctctgagctcctctctgagctagcaggctttcaccacaacgtctggctcctgagtcttgattggtaaaattcaatgtttgggtttttttttcttttctttttaaacaacaggaaaatgtgacaaggggtactccgcataggggcttgtttggctgaagtgggcagctgagtctttgttatgctctaagctggaagcagcagcagtcaggctgtgcttgactcagaatcttttggccccattctccagagttcttctgagaaaacagcccatatgaggcctgacacttgccaatgacttagcaaatggtttctccagaaatgatttacatataaccgtccttcaggaccctgaccagaagcagtgactaatggtggcttttcagagttgaggggcaggccagtaggtggagcctcagttcaccagtccttcctctggcttctggaaccttgaccttcacaagagccaaggatactagtttctggaaaattcaaagtagtgagatgcaatttgccttggggcccctcagatacaggctgcttcttgtgagactcgggcactcgcccgggggaagatgaatgaataacagggaggtggatttcctcagagaagtttctgtacaacagagggtcatggggattccatggcaactagggacgtgtgctatgaccgtgcgtgtgtatgtgcacgagagagagagagagagagagagagagagagagagagagagagagagagtttatattgcagcaaccattctagacaaggtaaggtttaccctggagccctggctctgtgggtgcgctgtggctctggacaagctggccaagtcacttcacaaagtatctattttcccagagttgaaaccaattatctctttgcaagcctactgtgcatactttgtaagcttatgggatttattttctttctgcatatgtgtgtgtgtgtgtgtatacatacacatgtgcgctctcgcacacgcgtacacacgcacacacaccacgtgttgttgtgtgttactgtgttgctaagcattcaacccaggatgccaagcatactaaacacgtgctctgcccctgagtgactctcaggctcacatttcattcatttttccaaacacccacatttgtcagacatggaacatgataggcaaaatccatgatctggtattctatcaagataccagcagacccagaccttatttcttccatgtctcagtaggggcataacttcccagaagagagaagaaaggtcctgtgagaggtaatcctcctttcgaagctaagatcatgccacacacccctcaggtctcatcgccccacagggtcacgcccatagaaacatttctgtaggcatctcatgattaaactgccgctactgactgttggttctgtttccttattctgctcagtgcctctgagtccatgattaatagtggaccaggctgggtttcctgcaggtctaaatgactcacttccattcacagtggctttagtgagctcaggatgcctaacgtttaacccttatttattatgtgcatgtgtatatatgtgtgcatgtgtcatactgcatttgtgactgggttcagtctttctaccatatgtgttctgggggggtccaactcaagttttcaggcttggcaccaaggacctttattttgagccaccttgccggttcttcccaggcctcatcaagggatgttaggatcactgactcccagcctccattttagacactagggtgataaggctcaagacggggagtgatatgatgtcaacctgggctccactaagtctccagaccctccctggggtctcctatacctctcagactgaagcctaaacttggtgccagaggccaaaggaagtatcttttgggaaacatgtgaccagcaggctgacctgactagaggagcaggaaatagacacccatctgacaaccctgagggtccaggaaaaaccatgaggcctggttctctcccacagacccaccacagtgcctaaacccctctgtgtgtcacatcttgatggacaagcaagtatcttggaagaaggggaagtccaggttctgctccagagtggtgagacctgaacctgtggtttgtgctgctgcctaaggactcagacttgggagacaacagagatcagagtcctttctatttctctcctcaaatttgcaaaagtgtcctaaaccaggtaagtatggtggtacatatctgtaatcttagcactcaggaagtaggggtggagaactacaagtagaaggttatccttggctatataatgagtttgaggccaccctgagctatttatttttattttttaaatttattattagtgttgttattattattagtgttgttgttattgttttcaagacagggtttctctgtgtagctctggctgtcctagaactcactctgtagacccggctggcctctaactcagagttccacctgcctctgcctcccaagtgttgggactaaaggaatagccaaatgcctggcttcaagactatctcaaaaggagccacacacagacacattaaaggcatggtgagcccataatctataataactgtgagttgattgcccggtgtgtgacagttcatgctaggcagaggaataagctagaatctgaatatagttccctctacactgaggagaatggcctgtataacaacagaaggttctggaacctgcactgggagactaggttatcaaaaaaacatggtggtctctgctttgcttaagtgcagtcatttccttgggagacagccaaaactcaatagctctggatactgtgacctgcccttagccataagtgtagctagaggatccatcctccagcccatctgtctgtcccttgactgcaatcccaaagggaaggaacatgaagccagagccacttccccacctcctcccgtccacccccacccattcttagcaagccctcccacattgctctccagcagaaagtgctaggccgtgaatgtgtcccacaggtttaggcacataaagtgaaggcaatggtagcacacacatgatacactccaggagaagtggtgtgcccacagtcgggggacccaaaaaagtctcctccccacgtgctctttcttttgagcaaaaaccagggtaagagaggctaagggaaggaagagaaggacaaagcttgaaccaaatctttgctctcccctgtgtggactctgggaaggtcctcagcaactctgaaccttcttttggtcacctataaaaggaacagcaggtaattcttggctgtagagcaagttcaagaccagcctgagtcacatgagaccctgtttgaaaacaaaacaaaacaaaacaaaacaaacaaagaaaaaaactcaaacaggaatccagagagacagagagacgaggggcacatttttatttttctgagggtaggttccccaaagatctaagaacctctggcttggtcctatctcttcaagaatccatcagcagcttccacactgccacactggagaccaagctgctaacacatggacctttgggacactaaatgatatcaggccttgtgttcgatgaagccctatatacggcacagctgtctgggacccagctgtgagaggggctaggcatgagcccatgaagccacctaatagagagccctgctttatcaaggttctcaaagaaaatcacttgtgggatgttgtagcttacttggtagacagcttgcctggcactcatggagtaaaaactgagtatagtgatacatgcatgtaattctagccctgcagaggtggaagcaaagggagggagcagaagttcaaggtcatgcttggccttagtgagttaaaggccaacttggggtacctgagagcctatttcaannnnnnnnnnnnnnnnnnnnnnnnnnnnnnnnnnnnnnnnnnnnnnnnnnnnnnnnnnnnnnnnnnnnnnnnnnnnnnnnnnnnnnnnnnnnnnnnnnnnnnnnnnnnnnnnnnnnnnnnnnnnnnnnnnnnnnnnnnnnnnnnnnnnnnnnnnnnnnnnnnnnnnnnnnnnnnnnnnnnnnnnnnnnnnnnnnnnnnnnnnnnnnnnnnnnnnnnnnnnnnnnnnnnnnnnnnnnnnnnnnnnnnnnnnnnnnnnnnnnnnnnnnnnnnnnnnnnnnnnnnnnnnnnnnnnnnnnnnnnnnnnnnnnnnnnnnnnnnnnnnnnnnnnnnnnnnnnnnnnnnnnnnnnnnnnnnnnnnnnnnnnnnnnnnnnnnnnnnnnnnnnnnnnnnnnnnnnnnnnnnnnnnnnnnnnnnnnnnnnnnnnnnnnnnnnnnnnnnnnnnnnnnnnnnnnnnnnnnnnnnnnnnnnnnnnnnnnnnnnnnnnnnnnnnnnnnnnnnnnnnnnnnnnnnnnnnnnnnnnnnnnnnnnnnnnnnnnnnnnnnnnnnnnnnnnnnnnnnnnnnnnnnnnnnnnnnnnnnnnnnnnnnnnnnnnnnnnnnnnnnnnnnnnnnnnnnnnnnnnnnnnnnnnnnnnnnnnnnnnnnnnnnnnnnnnnnnnnnnnnnnnnnnnnnnnnnnnnnnnnnnnnnnnnnnnnnnnnnnnnnnnnnnnnnnnnnnnnnnnnnnnntctggggacttggcttctgcagcaggtgtaggcctctgcagtcccacacagaagcctgctgctctcaaactagggacttcccctcctggtcttcaaagcactttcacacctgcttaggggttcatgaactgcctgggacctactgaaggcaccagggcctctgttctgagtcccaggagcagtcacttccatgggatgcttacctctcaccctttgcttaagatctctcccacaaactcactgcctacaaactcactgctttctctccagctaggtactcactgccatagccacctgccagatgttatcttcagtgcccccaagcactctgtttctccaagaccccacactgtcctaaggcagaaggacagcatgctacaacatggttagatcagctctagaattaaaacacaaaacaccagaaatggccttttggccaaaaagtagagggagctgcccttagagtgatggccctggggtctgagtgtagagtgtggtaggcaggaacaaaggttgagggggggatctagaaggaatgtgagagaacacagagtatgaagtgcagtggaagagactctgaatgcttttctcttggggtgatgtaaatgtgctcacaagtaggatcttcatgacatttctaagaggatttaagcttcaggcccctgtaaattcttagcacaaggtaagcagacaaaatgagcaatagtctgcagtgccaaatcaagaatacagggctggtgaggtgccctattgggtaaaagcacttgcaagagtgcctgagtgtatggagaggcaggaagcagtaaagaagccattgaaatggccatcccatggcataattaagggaaatatttttgtttgtttgtttgtttactgtgaataggagaaagaaaatatccagagacatttgaaagagtccagagtggagagaaagagaagcagactggacacggccagggtgatctgtaaaagaggtgagcgtggtaggggatggagaagggtatgggtgtagacaaatcccatagattataaggacattagctgggggaagtaaactagtgtggactttgaaatgaataacaagtactgtaaggagggactgaggaaggctggagactggcataggcaatcataggtatatgtccctggagtccatgtccctcagcctgagatacaaaatgaccccggtggagatggaactgtttcacaagatctcgaggaaaactggcttttctctaactgccagagatccttctatgatccccattataagacatatgggctgtctgagaccaaatacagaccacccactggccatcagagttcgatcctctctgaaacacgtaaaaaaacagatgagatggcaacacacttgtgatcttagtacttcttcagcaacatgggatgtcttgggccagctagcctggagtcacagtactgcagcagaaacaaaagagaccctgcctcagaacaaggcaggaaaggaaagccaactctggaaagctgtctctgaactacacccattccctgtgcattcagactcacatacatgtgtgtcacatgcacatgtatataccctaaaataattagccagttttttaaaagaataagagtctccaggcgtgaggccctttccccacccagccatagtgaacctctgccagggtctatgccaaacaaagaaacaaaggcctagggagcagaagttacctgtattgggggaggttagcagggagagacaaacttttatatgcacagtgtcttagtcagggtttctattcctgcacaaacatcatgaccaagaagcaagttggggaggaaagggtttattcagtttcacttccatactgctgttcatcaccaaaggaagtcagggctggaactcaagcagatcagaaagcaggagctgatgcagaggccatggagggatgttctttactggcttgcttcccctggcttgctcagcctgctctcttatagaacccaagactaccagcccagggatggtcccaccctcaaggggcctttcccacttgatcactactaattgagaaaatgccttacagctggatctcatggaggcatttcctcaactgaagctcctttctctgtgataactccagctgtgtcaagttgacacaaaactaaccagtacacacagtattatcactttgaatgggtgtgtaatagtccataaagtgggtgaacctcagtttccaaactcatttcctactgcaactcggagtattcccaacatttacagatacagtttaaagagacattctcgaatctatagtctttttgttgtggttgttcatttccaagttgagctgtttgttgatttttcattgtttgggttgtgaaattatggagcaatgagttgtaaactttctaaaaaattttgttcttttgcttttgctaacaaggactttttgacaaggatgctttctgagagcggttgcaccactagtcagtacagaagaatgaagttctgttttctctcgctttcccccgtaactattattatgaattaaaaaccccacaaatgacttgaaggcccagaagactaacaaaggctgctttcatttgcatgcctttggttactaggaaggttggactttcacaatgtgtgttttttatttggttcaagctggtgcaagctatttggatgctacatccgtgagtgtcttacctgcaccagttcattgtgaacacctgctgcattttgggaagcatgggctccaggttcctctgccccttcctgaccctgtgattattcgaagctggatctttcatcatcagggaggggagggtctggagtggctctatggaagtggcacattaggggtggattttccaggtaggatgtggacctcaaagaggcctatgtgtgaaatggaaagttcgtagggactttggaaaatcctgttaggaagtggcagctggtgccctgtgggaatctctaacaacactgaaggctagactaaaatgtggaagccaaaaggcccttgcatcattctgggcttgaaagaagccgctctcccatctttagagcacataggtagcatgcctgttttctcagtgttggtttttatgtttgaaaacaaagcaataccagacaaaagcagtgagcacctgctagtcagtgctcagcagtgaccatgtgctgccagtactcacagaagcaatcaagagagcctggagtccggggagccccacattcgaacagcagcttggggaatagaataaggcagacttcaggtgaggctccagggtgccagctatatccacctggcaaaaaagggcagggatacctgtggattgattaacatatgcactagtcttcacatagttcgttcactggtcagtccacccacctgcctacccatgctccatgcaggcatccactaatccatctattgctttatgcatccatttcccctttaccccatatccattcattccctcatctcatcagtcctcccatcatctacctactcatccatctacccatccatccatatatccattacctaatctcttcattcattccccaaccctcccactcacttaaccattcacagatatcttttcatccatccacccatcccttcattctgtgaccctctcatccatttaccatccgtccacttcatcactcatttgttctctattcacctaccccatctgcccatccatccttccttgcttccatccatccatccatccatccatccatccatattccaatccacgtgttctctttccactcatccatcaattcatccatcccctcatccatttatgcatttgttctcatcttcctcacccatctacccatccatccattccctcatcctcccacccacacttccatccatttgttctctattcgcccattcattccccgtgcagggctggctttactttacagcaaatgttacaatgaagaagtgctcatttttctcgaaactctcctcactctgtcccttccaaagaatcctgatgatgtgggcttagaatctcacccttcctgggggtggggaatggggctagaggcctcaggattctgtacctctcagactcctgagtcctgtacctttagagctgagccggcttcccggttcctcttcaaatccggggcggatcattcaaaacgcaggggagccccctgcgtgcgtgcgctgtggctagccctgagtcatctctgcacgtggtggccccttctctcttaggcttcacaggcaggcagatcgctgcatcacaggtggtaagagggtgggggagggaaggattagggctgaacccgaagaagggttaggaaggcgcagtcacattagaagtgatttcaccgcgggagagtcagggtgccggcaggtggccaggcgctggagactcgggaagccaagatgagcgccctactcaccgcagcagggttgctgttcctggggatgcttcaagccttcccaacggtaagggaatgacagtagccccggacagtgtgcgagagcagtggctagagtaaaggaggacaaggcaacctctcaccttattccccaactcaaactagagtgagggggcacaggaggcaactaaaatatgcaagcatccacaggtgggtggataactgaagagtaaagttagagcttctctcgtcacaaacgcaggtagtcgatagttgggagcagtttgctccttcattatccgtgagttgaacccggagcaagagaaagctgttcctttcctgttctgttactgctgccccagagggggtcctggatagagaaacttgagtatgcccttgttttgccagaggatgataacgggttgtttgtgcatccgtaggctggaagggctgaggaaagagaggagggggtgaatgagagcaaaggtgggggtctggccagctggtgatgtgggctgggtgccctggagcaagcacatggtggatatttgtcccaggagcaagtcagtgctgtctctggttctatagttgaaagccccagaaataagtctggtcaatgagttaggaaaactgaacaattcctaggggccaatgccacactaggcattagtgtgtgggaaggagacaggactttgaagagccactcagataatcttctttacggaacctaaggtctacatggaagaaaaaagtgcatggctgaatggtagctgggggagggagacaagggacagcagcaggcttgctggacatgaggtgtctctgctagagaggtgtgaagacaagggaggagagagggcaggagagagatggtaggaaggtgtccctttcatctccagtgggcagtgtgacacctgccctgcagagggcagaagtgagcagaggagccgtcctaccctacctcacccccatgcccgaagccctcattcggggaaggtaagagtttggagcaacaaggaccctggaagatgaaggaaaaagtaggatgtgaaagtggggaggtttggtttcttttctcctactaagtcgaaacattttttgatcagggcatggcacattcttacatgagtatgtaggtttaaggacaactctgggagttggttctctcctttgaccctgtgggttccaggaatagaactcaggtcatcaggtttggcagctagtgcctttacccacagaaccatctcacaggcctgtgaaaacatgttttacaattaaagccgtgtacttactactacctggaatgtgtgaaaatgcccccaaacaaaaaagtataaatgctatgatagagctaattgttttataccaatatcttctaagctgtaagcatgttcttgttttactgctatttacagcatctataaaagcatatctgtatttggatcacttttatagaaatatataggggtttctctttttatttatttatttcaattaattaattatttttcgagacaggatttctctgcgtagccctggttgtcctgagattcactcggtagagcaggatggccttgaaatcacagaggtcagcctgcttctgtctcctgagtgctgagattaaaggcatgtactaccaactgcttttttttttttttttttttttttttggacaaggtctcatgtagctcaggttggcccccagtttgctatgtagccaaggatggccttgaactggtccttctccttccacttcctgattgcttaggttgcaggtatgcactaccatatgccatgtatgcagtgtatgagattgagcttggggctttgggtgtgctaggcaagcactctaccaactggtccacatgctcagtttgtctgtgtttttgttttgagatagggtctgtgtaactcagattggtcttgaactcaccctgtaatcaaggatgtctgcaaacacctaatcttcccactggtgagtgctcagtatattacaggcatgtgccatcacacccaattttgtaatgttttgatttagcttttacagtgtctacagtaggtcttcacatccctggtgaatgagcactgagattcccaccagtgtcttctggtttgtttttataagctggagtctcactatgtagtcccagttagcctggaactcgttgtgtagaccagtctggtcttgaactgatacatctgccagcttctgcctcccaaatgctgagagtaaaggcatgcgccaccacgtggccccaacattgtcttctgtgtgtttgctgcctggggaggaagagtggttctttcctagagaagaggtaagagaatactggtggctgacagagcagatgtgcactgaaatgaaatggcatgccttccagtgtgcaagacaatgtcttttcacacaacagtgtaagacagtagcagcttcccacatcctaaccgacgctcgatcttatcaatctctattttgtggtcttgaacggactgtatccttcttatgttaatttgcatttcccagtgactgtaggctaagcatcaaacctcaagtctgtgggcctttcatgacagaacttggggtgtctgtggggaaagagctgcctgcccagcaggggtctctattcaggtccttcaagatttcttccacctttccattccagttaaggtttgaaatcttactaaaagcagaacaggataaaataatgacagcaacaaacctttttacagctggatgcatgactttaattccagcactcagcaggcagagggtggtagatctctgtgggttcagggccaatttggtctgcattacccaacactatagagagagaccctgtctccaaaacaaaaacaaagattagccaagcaaacagacacatactctgcacaatatatatatatatatatatatatattgctggttactacataactggaatcccagcacttggaaggccaaggcaacgatggtcagaagtctagagataggaccagcaagatggctcagcaggcaaaggcactctgactcttgccaccaagtctgacgtcctaagtttcatccccaagactcacatatggaaaaaaagaactaactcttggattgttctctgatctcctcaagtaggaggtagctcatgcatgagaatgcacacatatgtgcacatgtacacaaaagacatagaatatcatttttcaaaaaagttccaaggtagtctgagctatattgaaagtatatacacacacacacacacacacacacacacacacacacacacatatattttggtttgggatctcaaattctttttttcaattttttctgctttttttttctcagtttttgtcactttgtgacaagcatgttttctgaaaaagagacaggccttgtatttgtaaaattatctgggactcaggtggtacaagtccagagagacagagtttcctctgttccattcttttcttccagactccctgggatggtataaggccatgccttctggtgaattctgtggcttcagaattcccctgatatcttccccgggcatcctgcctttggctccagtctgattttcctccttcagctctggcttaacattttaaggttcctataggggaattctcatgaatgagtctttgcagcatgcagctctgctaataggctgtcactgatgaagcatgcccagtcatcttgcacagtagggctaactgtggcggtcttggtattcaacagagggcaagagaactttcttggattcctgtagaaaagtaactttcagaaccattcaaatcctgactagaggcagaattccatgggatatcccagaaacagaggaggaaaccaaaatgggaagagaggggaaaaggagactatagcttctcttaattgaaggctgccttcctcgattgaggttcacaagcaacaagggttccaaggccaaggcagggcagctgcattactcagctcgagagcagttctgttgagactaggacagcccttactggaactttcagtggtatctactcatatctgaccaaaatacttcttgagtaggagtgattcatttctaggtctgcacatactggcatccgatgcatctcaggacagaagaaaagtgttggggggggggggaccctgaggctggaggtcattgcacaggcagcttaagcccaggttggacctgtgtggtttctgttgagctgtgttctgacttgggggtggcttatctgtagttatccaagtagaagtgcccagctagacctgcagatcagacgacatttcagagaacataccagctctgtctaagggaaggatctgtcttagagaaattagcagaagagcctggctcaagaaatggtgacaaaaagaaggtggcatatatggccagcccagaatgggcaagggaggggcactgcaaggaggaggcatgcgaggagcccagttgtatagactgcagtgggttaagaccctgctctcactgggcaacctaatcagatgtcacatctgccttaataagaggagctatcaaggaagaggcaagcagcgatggggttgtggggaattttgttaggctcctggctgaatggtgggaaaagcctgagaagacacagcaagtgtttgggaggagcatacaagttctattttacccaagttcaggtctcagatggcgtattcaagtatgcatgcttcaagagagttcagcctgcagaactcgtgctgcattccagacccgcgtcgaggggcatcaactcttttcacataagctgcctacaatagcctagggctccacatatcttgatacctttcatcctattgatattttccagtccaggagtaagatctttctttctatttctcttttacacagatttttatttatttctatttcatgtgcattggcattttgcctgcacagacatctgtgtgagggtgtcaaaatccctagaactggagtttcaaacagttatgagctgtcatgtgggtgctaagaatcaaacttaggacctctggaagagcagccggtgctcttaactgctgagccaactctccagcctgagtagaatcttttgttcagcctggtgatgttttattagatccttctcactgctgtaatgaactttaacaaatttggtggccaagagtgtattgtttggtggctctaaggagtggagcgagctgaaaggaggtcacagaactgtgcttctgttacgctccagggactccttgttcttcctagttgcctcttccatcctcaacttcctcagagctctggcccacctggttgcatggtctaaagactgtggttgcattgggaatcatagaagcaagccaaacttaccaggttccacaagaattacattgatctcttcgaatacctgaaaacttcctaccaggttcctcctccctaagattagtctggccttgaacttcaaatcctcctccttccacctcctgagttctaggatcacaggcatgcgtcactattccagatatctctttattgttacagttgtttatttgtgcacatgtctgtgtgaatatgcatgccaggatgtgcatgtagaggtcggaagacaacttgcaggaattggttctctccctccttccaccgtatgagtcctgggggctcaaagtcttcaagcttagaggctttaactactgaggatttcactagtgcagagatcatatgaaccctgcaatgggaaatccttcaagtgtcagctctgtctaatgtcacaagcccttccagcgaagagcttagagagtatgtggaagaaaggatgtgtgtgaggatttggccctccattgctggcattgcaaatggaagacgtggcctagtggtatgttcttgttattgtaactaaacacacaaggccaagtgcttcaaagaggtttcatttggggctgacaagatgattcagtgggtgaaagtgtttatcacacaggcctgatgccctggagtttgagcccctgaactcatgtaagaacaccaatgtagaagcagcatacaactataattccagatgagaagggaggtggggataggtgactacgtagcagaaacaatgaaagactctgctctaagatggaaggtgaaagcaaggaactgatacctggatattgtcttctgacctccacaagtgtgcactgtggcatgtgtgtgacacacagacatacatatacacacagagagcaagtgcgctcgcacgtgcgagcacacacgcagagcacatagaagcaccatcatcatcatcaacaacaacaacaacagtattttaaatttttagaaaagaggtttatttgactcctgattgtggggcctggagagtctagacagtgtggtgcccagtgttctgtggcacaggaattctcagacctgtggttttaaagatccctatgataggggatggagcgctgcttcagtggttagcagcacccgttgctctttcagaggaccagcatctaattcccagcacccacatggttgttcataaccactcataactcaaattctaggggatccaatgcccttttctaacctccatgggcaccaagcacccatgtggtgcacatattacatacagtcaaagcactcacacataaaagaaaatgaacatatctaaagaagaagaaaaaagcttttggtggtagcccgatctagtggtacaggcctgtaattccagctagtcaagagactgaggcaggaggatcataacttgcctggaaattttagtgagaccttctaaataaaaacagaggcactaaggcagcgtaggcagagtgcttgtctagtatgcaccagggagttggttcttctcaagtaccagagaacacaaagccaataaaacaaggacctttcagatctggagagatagatctgctgttaaaaggcttgactcagaacccaaaacaaaggcctttctggtgtcagtagtgtgaatgggatgcggggacagggtaagtatgaggtcaccctgagagaacaggaaggtgaggaagaactggtggattcggggaataaaactacagtttaggcagaggcagctacaggtgacttagtccctttatgggactaagaaagctagggccttccccccagcctcctcccctgcccccacacacacacttggggctccctctgtggggctctgagtgacaggctcccattgctaccctgggcatccagaagatagtgcaggctgtgaacttacacagaattttagaaaagagtccccaattattctagtgccatggttctctatgtccagctactcggaaggctggggcctgagaaacattttgtaaccagccttggctacatagcatgacccagtgtcaacaaagcaaagccaaacaaacagcctgcattctaatttaccagttattcaaatattatccattagagtgatctccctcacattcctcagcagcctataattcagacactgaagttggttggttggttggttggttagttggttggttggttggttggctggtttaatggtgctggggattaagcccatggcctcatcctaggcaagcatactaccactgaactatatccccagtcctctactgtctccccaccctccaagttcttttgagataaactcttaccctctttccaccttaccagccaggtacccaggatggacttgaatttgtcttgcctctatctcctgagtgctggaactatatgcactgacttaaaaaaacaaaacaaaaaaaaaaaaaaaaccaaaaaaccttttgagacagggtctcaggtatcctatatacagttgagggagaccttgaccccttaatcttacagcctctgcctcctgagagatagattccaggtatgtgccagcatgatttgttctgagctgacattttcattattatttatatgaggttggtgttttaaactctgttcctcccactctttaattgctgagccatctcttcagtttctgtactgacatttaaaaatgggtaaattgtagaaagtcccttaatttgggctcatgatttgatatggagtatgggggacatgttgtcctctccagtacactggactttttaaagtcctgtggctgagatggggagggggagaaatggagacaaggtacagttcaaatctccaatttacatttggttgctgtgtgagtttaggcaaacagctgtgcctctctggacttcagtttctttatctataaagcaggagttggctgaaagtaggctggctttggagaagtgatgcagggtaccatataccttcacctgccctgggtggaacagcaggaatgtaagcagacagatggttctcagatggttcagggacagggcaatgctgcctcatgctctttagctatcagtgagacgatggggcaggccaggagggaaaacccagggcaaggacataaaattttcccatactctgaaggccccaaggggctgagtcctcacagctccagctagctctgcctcaggtttctgtacacacgcagggaggggcccatcagggaactgcagcttgtgcgcgctgggttgctacctgggagggttctaggagccccctagccccacccctgtgacttaagaaataaaagcttcttcaagggacctgcaaaagagagagagagagagagagagagagagagagagagagagagagagagagagagagagagaaggagggaggggggagggagannnnnnnnnnnnnnnnnnnnnnnnnnnnnnnnnnnnnggagagagagagagagagagagagagagagagagagagagagagagaacgaacagaggcagcctgtgcctcccgactgtgctgtgtgaatgtctcagtgttcttagctgcagcagtcagaaccaggtatcatacatactaggcaagcactctaccactcagctacaacccagcccctaaaccttaggttatatttatcatttcaagttaacaaggtgacatgatttcagaagtgtcaaaaaaaaaaaagtatagttagcacccacacacccaccttccagcaccactaagcttggtgtagctctctgaagtttccacaaataaatacaacaccccaccctacccccatttgcatcccaggctggccttgaattcatgtgtagccaaggcaacaaatacaacaccccaccctacccccatttgcatcccaggctggccttgaattcatatgtagccaaggcaacaaatacaacaccccaccctacccctatttgcatcccaggctggccttgaattcatgtgtagccaaggcaacaaatacaacaccccaccctacccccatttgcatcccaggctggccttgaatccatatgtagccaaggcaagtgtgatggcggatcttggttgtatccttgacacatctaggaagagggaagcttggtggatgaattgtctcccattagtttgacccatggcatatatgggtggggcattttcatgttggctaattgatgcaggaaggctcactttggaggtgccatccctgagcaagagggtcttgtcggtataaagaaagaggcagccaccgtgagcctggggaaaagccagtaagcagtgcctcctccatggtcaatgtgttagtttctaccctgacttttcccaatgatgggcttgtctcctaggtgattctaggtcctgttaagttgaaaatcaatgttaaccgtgacaaagcttgtgagacgctggacgtggggaaatagaaggagtgggagagatgacctgcgtctcgccagaactcgggggcactgggcgggcagacttgggtgattgccgtgggatcccatggaaccgtggctggatgggcgtcaggccgccaaactcccctctggtgggtagggaaaacataatctgggggttctcagtcttggataccccagaacaccgctgaatgtcttggaagagctgagaacgaagtgggggcaccaggggctgctcagtcagctccaaggccaaagggagaaaggggtaggggggcgaggaaaggtgctgggtggtttctgcaggggcaagagtccttgttccggtctggcagctggaaacgctgggaggccttcctacgggcgattagacgtggttctttaggggaaagcctattccattgctccagcatggcgggtcctgatgagcagtgatggtccatgtaaaaactttattgtagaaaagcagagagagagagaagagtaaagaagcagagggcggccgtgcccctgtggagaggggggtgggggagggagagaaggagagtgagaggtgagagtaagagaggcaagagcctcaggtaactgtgggggtggaatctagccagaataccatgagcttgggcattgcttgtgtgactgataacctcaggattatggagttgagggctcatggtgtcaggagcctaatgtctgggagcatagcttacagttctgtcccttgtagaattttctactgggtctccagaacacagactgcctttcacagtccaacaaaagccctcccagtggggcttacagttgaaagaacactagaaagctgcaggactttcttcccaataataagtgaggctggtattagtcatgagagaaatgcaaagaaaccataccacaagctatcactgcaccacaccaccccacccccaccaaagctactgcatctttaaaaagcagcattgatacccaacgcacgttggcaaccatcatgcatcggttagtgccaacaacaatgcaggacagatggcagcctcgaacattgcagctaaatgatcagtgcaagggcttgggggaggggggggagcactggatggagagcaaggctaggagtgtggctcagttggcagagtgcttgcctagcatgcctggagccctggattccagccacagcttaaaactgggtgtagtggcacatgcctagaatcccagcacttgggaggtagaaggaccaggagttcaaggttatgcttggctattagttgagtttgaggccagcctcatctatatgaaagtcttgtctagaaaagaagaggggaggggagagaggaagaaaattagatgatggtctatcagagctggcacttaattcactatagctgtgtttggaaattgctacataggctagcacatgcctttaatcccagaactcaggttccaggggacctgacaccctcacacagatatatatatacaggccaaacacattattttcttttttgtttcgttttgagacagggcctcaaggtatagccctggctgtcctggccttggactcacaaagatcagcctgtctctgccttccaagggctgagagtaaagtgtgtgccacaataacccccaccccaaaaaataaaacagactgagcagtttgacctatgtcaaattcaagagcagacagaattaattaatagacatggcgatgggttcatgttttgtttccagagagggaatctgagtatgctgggcgtgggcaaggtcctgcctgtgtctcgggatctgggcacttttccatctgggtatgcaggatttcagctcatacaaaactttaccaggtgtttttattgctgcagttgtcccagagacatggtgggaggcttgtcagtcccctggaggagaacactggtgggaccagctgctgctatggttgatagcttgaaggtatctgagagaactaactggctgagaggaggggtgcaggggggacctgtgaacagaggagggtatggagactcttgggtgtcccatttgcatctaagctgtcgttgtttctgcggggagatgaggagtcaggaatttctcctgatctctaggacggtaggtctcagccttgacagtgagcggataccaagtggggactgcagggtggaattaagggtggaagtctggccttatttcaccagcttctctgaccctccaggatcgaccactcaagaccacctgtgccggagacctcagccactacccaggggaggctgccaggaactgctgttaccagtgcccctcaggtgagtatgggataccaaaggcaagaggtagattgttttagtatatgatattcatggaggaactggagaaaagcaggagttgaggagggatggatagaaggtaacaaagataatcatgatcatggttagctacaggtttccaaaggccatctctaatgtcacagggtctggggaagggcaaggctgccttctgggaagactaggtctgctgctgccacaaggatgcaagaccttctcaccctcctcctccatcattttatgagtattttgcctggatttatgtattgtatgcatgcaagctcttgcatagattaaaagagggtgtcagatcccctggaactagagttacaggtggttatgagctgccatctgagtgctggggcttgaaactgggttctctttcaagggaagcaatgaacctgctgccctacctcagtatcaatcgagctgggactgcaggactatactacctcaccctgacctttacagttcatgtctgctccaagccagcacatgtgttcgtcccaggctgccctgggctgcaacttctgtgggacagagcttgcctaaccactgctggcttcctggaatgctcccccacccctagtacagtgtgagttctagaagaatttcaggaaatccatctggaacaatcttcaggcctgaagattagaaaaggggttatgagcctttttgatcccctgtgactatgatcaaaagtctcaagcacatgccgggggttcattggtggctggggtaggagatgcagctgtggtgctgtctctgagatccgggaatagacgtctgcttgaaagaaacattagctatgacagttgagggtgggaggaagtctctgtcactggctcagtgtatctggcccctgcttttaggacagcatcagaggtaggtcaccatgtctggagggcttcctgtgggtgagaagtagtaggcccatgtacccaatattaatgcttcccaggcacaatgtctggaggtgggtgcaggtagtactgtacaaggtcatagaggatgtgactatagctaggtgagatgcttggacaactgcttagccctgtgttctctgatggagcagtcttgcacgggttaccagatgatgtatctgagaaagaacttaataacgtctattcccaaaaatgattttaaaatatttctgtggaccttgagagatggctcagtggttaagagcacttcctgttcttccaaagaacccaggttcagttcccaacaacctcattaggcagttcacaactgcctgtgaacttcagctccagggaatctgacacctctgaggacacacatacacacacacacacacacacacacacacacacacacgacatacactcataaacacacatatacataaagaaaactatttgagctgggtggtggtggagcaagcctttaatcccagccagagccaagtggatttctgtgagcttgaagccagcctgatctacagagtgagttccaggacagccagggctacacagagaaaccctgtctcccaaaacaaaataaaacaaaacaaaacaaaacagccaaacaacaagaacaaaattaaatgttcctgtgatgatcctttgatgacagcttgacaggatcccatgtagcctaagctgcctttgaactttgtggcagcgaatgctggccttgaactcctgatcctcttgcttctcgccctctcccagtgctgggattaattacaggcctgtgctaccataccgagcttcttttgggttccttcctgccccctacttgcctcccaatccagctcattctcttccctgttcctctttggggtcctgcagaccattgctttcccctagttagaaactggaggacccaaggacaaggttctgtcctgattaggtttctgtccagagctcttcctggcttacagactgaccgtaccacccttctatggtgtgtactcctttttcatagagacccactcatcccatgggtttagggcttctggtgggctcctttatccatagtgagctcccaaacctctgtctctccaaattaaagttaagggtttcattatgaattgggggtggggagtggggcgtgtgagcaattctagtccacagtggtctcctcccacctccccatcctctcatctagtcctgctcctcatctattccctccacccacccacccacccacccttcaatccaatggcaagatcactcttggaagaggtcatttcttccagctcctcccgtttttttttttttttttcaggcctctggtcctttggtgctgtctgtttcctttacccctgcgtgtccctttctgctatctccatcctattgcagctctgagacactacctctacgagccttcctttgctgcaagggactggcttcctgcatttctgttctggtcggtttttgcccttctgtccacagagaggtgtggccacagtgctatgacgttctgaagccacagttccagtcagagagagaaagacacttgtgagcatgacccccaggtcttaggctttctccacttaacagctgggacttacagacaggggctggtccctcctctcacttcctctaaggctcagtgctgaaagtggctgagcacctcaggtctttgtggtgggcggggcgttttgctggagttttattgaccctgtgcttccggacaagccacagaggaaaaccagaaaaaccccttcttccgtgttttggggaaatttctgacattttgcccgccctctcaaatcagcgctcaactatgtggcagggtttgcacgtgggtggtctggtagaggaagctggaagacctttgaatttgagaggctgagaggtcttctcctgtctgtcctcacctaggaggggtgccttgccacctgctgacagtcacttcccagttctctgctgacatacctgtggtgacaactcactgcctgcatcataaaatgaccaacagcacttatgattcaggccactacaaaggaggcctggctctttccccacagtagcacataaacctcataggaagccagagaaggaacttgaacacggtccacaatcacctgagctcaaccctgagctccttcagccttccttggtgttctggaccccaggccttgttcagggttgggatggtgaaggccctggtgtctctccagcttctattcatgagtcagaagaacataggttcaccaaatatgatccaggccctgcaacaggagactcaatgattgctgtaaacagagatagccatcctgaagagtgtgggagtatttcaggtagataaatttagatactgaaatttaactccccagtcgtgacgaaaggaatatgccaccaagccagatttcatcaattttaaccagaaattcagtagaaaaagccagaccatccatcttgaaaaacgctcaagggatggggcttatcggttggtggtctgatggtcatgtgcccatgttgagccaatcacaatggtgagaaagataacacgttctgattggtctgttggagtcacatgcctattctgaggcgatgatggagaaaaatgaaatgttctgattagcccacctcggtcatgtgcttaacctgtggtgaagcagtgggaaacatacgtgactgaacaaacatgacaggctctggcagaacagatagaacctggcagatatcatgtaccctttgcctccgtcatcatcctgcatctcctgtcctctaagtttgggaggaagattgctgggtggttccagggcctctcagtcagcttgaatcagtatcttcatggccttaactccccatagtccccccagttccctcagagaatcaggacctctgctgagagtgacagccagcactcagactatacttgctgaacttcaccgacgcttcacccttgtccactctaggagaaacagatcatattgtcactatgagtgaggtcgctgcaattgtccatggtcacggattgtcagttggcaggccaggaatgccagatcttccccattcttgggctgcctatttgttcccagtgacctccatcgaggtccatgcctccgtctgtaacacaagcattatctgatgcaaccgcttaaagcagagatgaatgggatttaggtatgagaaatggagggtggaaggccagcctgttaccaagacaacctagcctagaacttccctgctgctttccccagggttgtctccgacacagccatgcccacggggtcctgcccactgcaggaagcagtgtgcacctgactactacgtcaatgaagacgggaagtgcacagcctgcgtgacctgtttgccaggtgagaacctattctctctccctggaacgtgtctctccaggggtgggggatgcgcagaatctgagaggcaggaagtatcaagatctgatctcctggtgcttctatttacctatctggatttgaagattgatatcagcagccatcttttgcatccatacttttcagaaagatgcagtgtgctccctggagggagaacgggcatcatcacaatgcccccatgaaggacccttttctcaacccatttctatagtgaagaatctgaggattcataatgtgaagggccttcctggagcagtccgagcagtgccctggcatcaagagctgcattctttctaacaaagaaggtgatgcttccaggagagttcttgaaataggttcttctaatattaattgcttgtgcttagtgatagtgtctggcattttcttttggttttgtgtggatggttaggttgaaagacatgttgagattgttctcaaaacctaataatcatattttatcaaagctttcagtgccttttttataatgtgtattttgtttattgcatgcaaagatttttctaaagattgtattttcttcctaattgtgagtgtgtgtgtgtgcgcgcatgcgtccttctgtctccatgtcctgggtactgggatcacaggtgtgcactgcaatgcctagtttatgcaatgctgaggatagtactcaggactttgatcatgcaaggcaagcaatactcttagctactgagccatctctccaaaccccacccccatctttttaagcatgggttctggagatgaagctcaagtcctatgctttcacagaaagtggtttatcccacagccatctccctcagaggagaccatttagtagtcagactccaatacagaagatgagctagtgtggctatgtattgctgagttcctgcctcatcgtgattcagctgggatgcccatcatatgggatttgaccatagacggtgtatctgtgcccagaacatacagtgcacttcctaaaactcctcatgcttctatagtttatctttccatcctcctcaccgtggcaaccactgatggctctcctgcctgtacagttaaaacatcagtcttgctggaggtccatgaaaatcacagtgtaatgccttttcagaatggcctgtcacacagttacgtgtacttcagttctttccatatcctgggacatcatatatatgcatggagtgtgtgtgtctgtgtgtctgtgtttgtgtgtgtcagtgtcggctgatgtcaggagtcttcctcagtcattctccaacttcctatttgagacggagactctctcagaacctggagctcactgattcagctacattggctggctagccagccctaggagtcttcccatttctgtagcagtcatatagggtcctctcagttcagttttttacatgggccctagagatataaactcaggactttctgctctaagaacaactgcttttacccactaagccgtctccctagccccacatttatttgtttgtaatctatgtagtagtagcagacatatgggctggaagtgaaggttaccctcacgctgcccctttcatgcacatcaggagaactgaggagaggcacagagtgacagccaactggtctgacagagggtcatgtggcatcttaccttcatcctggattgtccctgtgtacactggacccccacccttggctcccctctttcccttccatgaccctctctgtgtccctcaggccttgtggagaaggctccgtgttccgggaactctcctcgaatctgtgagtgtcagcctggcatgcactgctgcacaccagcagtcaattcctgcgcccgctgcaaactccactgttctggagaggaggttgtcaagtctccaggtgagtgtcccacagctcccacagctcccacagctccttagtagctactgttgtgcccgccacaggcctcctaaccttcccaccactgtaggataaacaggtcgaagcttctctccccatgctgtgatgtgtgcagcatccatccggggtttctgctgttcactgctcacatctgcgtcctgtcagaggtactctactggcagaggcccacgcctggttaaaggaggctgtgggcccatttgaagcttggggtcagggacgattctccggtggtccacaagtaagtaggaagcctcaagtctctaccctgggagttatctgacaaattagagctaccttccctgcgtcagaataggacattttattggagagaggagtactgagacattaggcaacagattaaaggcagagaaattactttgctttgtttttttcccccagtttgcctcgtgacatcaggccttaccatctcccgtttctaattttttgacaatacaagggaggaggagttcatggtcagaggaagagataagaatcatggaacttcactggttgccattagaagtggtgttttggaggctaggctgattccatagtgagactctgttctcaaaaaaggaggtggtggtgtgctttctagaagggggacatggaggtgggggtgcaaaaaggacagtacaatcacataaactcctggtggggcaaacagatggtgaggggtgaaaattgcaaacccttttctctaaccggtgtccttggcttttctggctcctagcttcatgggctttttccaagttcctgaatcacagaatgctctctgtactgtgggaccctgtctgcaatcagcagcgtagctgagggctgggctatattgaagattttcacctgtggatagggccagttcctctaactctttctccttgctcatatgatgaggagatgttacttaaaggcttccgtgtttgtctgtcagacagattctcaaccttccagctagcatggctaggctgtctgggcagagttcccaagactgccacatgggggcaacagaggcctgtctctgaagtcctgccattgccatgtgtaaaaaaaaaaaaatgcttaaaatgtggcaggtctaagttaatatgttctgtctataatgctcagtaagtttcaaagacctaccatgtaagcgagaatacaatgtatctttttatatttatattggttaccaactgacatagatcattatgttgttagattatttctttctgagacccactctcattttgtagcccaggatgtcttgtaagtcactatgcggcaagactggcttcaaaaccacagtaatccccctgtctcatcctcccaagtgtgggtattaaatgtgtgagctgtgtgtgcatgtgtgtatgcatgcatggacatacgagtgtgtgtgtgtgtgtgtgtgtgtgtgactgaactcaaggccattcatgtcatacaaggactataccaataagcaatactcctagcacaaagacatcattaaaattatttatttctttatttatcttttgagacagagtcattctgttgcccaggttggatttgaacttctgatcttgcttcctcagactcctgactgctgggattacaggcatgtgccactacacccagattcatttttatttttcgatttatttattttatgtatatgggtgttttacctgcacgtatgtctgtgtaccacatgcatgcctagtgcccacagaggcaagaagaggttatcggatttcttagaattggaattatagaaggttgtgagctggggattgaatcccatcctctgaaaaagtatccagtgatcttaactactaagaccacatccctccttttattgagacagggtctcattatgtagctgttggctgacctggaactcactaagtagaccaggctgacctgaaactcacagaactgttcacttctcaagtcctgggcttaaaggtgtgcggtactggcatagtgacacagcacattctgtcagtggccctgccacagtcacctgaccttgttcatctctggagcccctgtggactctcccagaaggcagctctgggagatgtaggatttccggttgtgaaaggggagagtaacttctgtttcagcatagctcacagatagccaaacactcaaggctattatggactttcttcgcaagcatcgcgtgtgtgcagagcagattccatcagctcctttctgtaggtagggagtttgacacccagagatggcagatgagcagcccaagaacgtagagccaggattgggtgctcagctgagctgcgtcaacttcatcgcactgctgaccttgctgtgttcacctccactgaagtagttggggcatcttccaactcatgtgggtcactccctccctcggagatgagattggcgttggggtgtgagaaagtacagtacaggcagtaaggttgagcgcttactgtttattacctagtatgacagacttgttttcatgtggttgtttatataaacagcagcctaatgaagactgttatgatctacttgactgcctggcttagtaagaatgtggtagagatggagggcannnnnnnnnnnnnnnnnnnnnctgtttgtgtctgtgtgtgtgtgtgtgtgtatatgtgtatgtgtgtctgtgtgtgtgtgtgtgtgtgcacctgtgtgtgtcagtgtgtatttatttgtgcacgtttgtgcttgtgtctgtgtgtgaatgtgttgtgtgtgtctgtgtgtgtctgtgtgtgtgtctgtgtgtgtctgtgtgtgtgtgcctgtgtgtgtcagtgtgtatttatttgtgtatgtttgtgcttgtgtctgtgtgtgtgtctgtgtgtgtgtctctgtctgtgtgtgtctgtgtctgtgtgtgtgtcagtgtgtatttatttgtgtatgtttgtgcttgtgtctgtgtgtatctctctatgtgtctctatgtgtatgtgtctctgtgtatgtttatgtgtgtgtgtatctgtgtctatgtgtgcctgtgtgtctttctgtgtgtatatgtctcttgtgtgtgtgtctgtgtatgtatttgagtatgtctttgcgtgtatctctatatgtatctgtgtgtgtctctttgtgtgtgtgtgtgtatctgtgtctatttgtgcctgtcttgtgtgtctgtgtgtgtctctctctgtgggtgtgtctgtgtgtttactgtgtgtgtgtctatgtgtatgcatctctgtgtgtgttactgtgtatgtctctctctgtgtctctgtatatatgtatctctatatatgtatctctggggggcacaaatataattatgtgtctgtctgtctctgtctgtgtgtctgtctgtctgtctgtctgtctgtctgtctgtgtttctgtagctgagtgtgaacatctgtgagcgtcactgaccaagccaagtgaagggatagatcctcctcactccagagtgaacagatactgggaaagccagaatctctgtctcggggtagccattgtgtcctcctagtaccttgtccatgattctacatgtggtggtgacacttctgctcctggggactctgagtttctcagtgcctgttctgaagacattgctgtctcttttataggcacagcaaagaaggacactatctgtgagctgccttcctcgggatctggtcccaattgctccaatccgggtgaccgcaagacacttactaggtgactcctgtcctcctttctgttcctctccaggtgatcttggatggggctactctgtcccatgacacacagggtgcacaggcaggatcagcccaggctcgcaggaccctagggtggctctctgacaagctcaccagttatatgagtccctgctgtgtgtgtctagctctgcctgatgcccataagagacccaggtctaagaaacttggctcttgctctcagatcatagcagggcacataggggctgagacaggagcctttctccatagacactaatccccaaacccagacctcctggtttgtgaagacatcagacctttgtctggcttcttctacagccatgccactcctcgggccatgcctactctagaatccccagccaatgacagtgcaaagagcttgctgccaatgcgggtcaccaaccttgtgnnnnnnnnnnnnnnnnnnnnnnnnnnnnnnnnnnnnnnnnnnnnnnnnnnnnnnnnnnnnnnnnnnnnnnnnnnnnnnnnnnnnnnnnnnnnnnnnnnnnnnnnnnnnnnnnnnnnnnnnnnnnnnnnnnnnnnnnnnnnnnnnnnnnnnnnnnnnnnnnnnnnnnnnnnnnnnnnnnnnnnnnnnnnnnnnnnnnnnnnnnnnnnnnnnnnnnnnnnnnnnnnnnnnnnnnnnnnnnnnnnnnnnnnnnnnnnnnnnnnnnnnnnnnnnnnnnnnnnnnnnnnnnnnnnnnnnnnnnnnnnnnnnnnnnnnnnnnnnnnnnnnnnnnnnnnnnnnnnnnnnnnnnnnnnnnnnnnnnnnnnnnnnnnnnnnnnnnnnnnnnnnnnnnnnnnnnnnnnnnnnnnnnnnnnnnnnnnnnnnnnnnnnnnnnnnnnnnnnnnnnnnnnnnnnnnnnnnnnnntcctttttagttctcagttggggagatttttgtctatagctgcttggttctgaggcagctcatctccacaggcgttgctcacctcatggtggccaggatgcacaaagaggcaaaggagaggtagggactttttcacggacgtactcctgatgacctttctcccttcctctgggctccaggttctgaagctccactgcctctcagtagcatgatggatgtctgggatacagtagcatgatgggtggctgggatacagtggcatgatgggtggctgggatacagtagcatgatagatagctgggatacagtggcatgatggatggctgggatacagtagcatgatgggtggctgggatacagtggcatgatggatggctgggatacagtggcatgatgggtggctgggatacagtagcatgatggatggctgggatacagtggcatgatgggtggctgggatacagtaacatgatagatagctgggatacagtagcatgatgggtggctgggatacagtagcatgatgggtggctgggatacagtggcatgatgggtggctgggatacagtagcatgatagatagctgggatacagtagcatgatgggtggctgggatacagtagcatgatgggtggctgggatacagtggcatgatgggtggctgggatacagtagcatgatagatagctgggatacagtagcatgatgggtggctgggatacagtagcatgatgggtggctgggatacagtggcatgatgggtggctgggatacagtagcatgatgggtggctgggatacagtagcatgatgggtggctgggatatttaccagagttccttttctctctttgatatgtgtacatacttgtgtgcaggcatgcttgcgcgcatacatgacacatgtaccatggggtcagacgacgacctgtgggtattgattagttggttctcttcttccacaatgtgggtcccaggatccaactaaggtcatcaccttagtcacctaaggtctttcctgctgagccatcttgctgccctttaagcttcttctaaataaaaagcagaagctgcttttggaaccctgccgcagaccctcttgggtcccttgtctgtgtagaatgggtttctagttgcagatgggcaaggagtcagagaatgacagacagacgcaacgcaagaggttgtgtagaatctgaatgtaatttttcaaattgagcatcaaactatttatacagaagaaaatagggaagttaggtgacacatcggcaaggtacaaatgaggttaccggatgcttaatgactcttacacaaaacagaggaatgtaaacaaaaggactggcaggaactgggcaataaaacaactgagacaaagtcagctctatctaaagtcaactctatctaaggtcatagtcttagaagccaggtgtgaggtctttacactcctagggcaagggctttcacacccaagttatggttctaattagggagttccgctctagctaaccttctcatgaataatgcaatactctaaaacaacagcctgatctacttcctaaaccattgtaaattcctgtatatgggagcgacttggattttatcctaagtgatagtgtgaggggactttctactaataagtaatgtagtctgccatatataactataataagaattctaaacttacattgctaagcttgccctgagatttctaactctatgtagtagatagtaaagcctgatttctttcactatctctcttacaatactagaggcaattctgaatgtcactgaataggcaacattcttactgaattcctactgaattccaagtttgtcatcttcaagaattttctgggacgttggaacactggcgaaggcttagctatgtcagaattcaatcttaaaaggcacttataataaaataatactaaaagagagcacgtggatccatacaccagactaacacggggatagggtatcagtatacgggttatgagagtaaccgttgccagagttccaggaggtgagtttccgtgaaactctttgcctcgtgagtgcttccaggcctctcagcctgccaagcagacttcactggagcgtgcatagcagaacccatggtaccatagcctctccagtttgatgctttaaagcacaaccctcatggcctttgtcacttgtagccaggaattgtgtgttatggaagactcccactcactactttccactacctcccaactgcctcccactgttccccactgcagactggatattcaaactctctgcactgattctaatatgtcatcatacctataggtaatgcagagaagaatatgaccttggagcttccatctccagggacactccctgacatcagcacctcagaaaacagcaaggagcctgcaaggtgactcctagtccccccaccccatgggaagggcagaatggccctttgtatgctcaggcagtgtccaggaaagtaagggctagacatgcaggggcatcagaccttgaggcctttggggaggttggggaggaacatggctgtgtgtctgtctcagtgattacaggattgtaaagccagagggtctagagcttaatcaatacctcacaatgcctgtaaagactgtgttgatcttttgggtacccaggcttcatctttaccctctgtagagaagaaacatccttcattagacacaccctttttacatggcaactgtgaccatcacccttgtccttggtttcctttggtatagtaccgcctccaccctaagccttgtggtagatgcctggaccagcagcaggatgcagcccacctctccattgtccacgggaacaccatttctggatccaggtaatgatcattcactgtccaaagcaaggggcagcaggacttcctttcagggctttggcctcgggtggattgagaaataaagaccaagcccaactttctggcttctagaactgaccctgtggctctgccgtttcctaatattatctcattcttgggacagaacttttcttttttcatgacttcattctgatgacctataattgctacccaaaattcagttttgaggctgggggtgtggctctgttggctgaattttcacctagaatacccagcacctctgggtctgatccctaccagggtatccacggggcttcgtagtgtatgtctataatctcacggctgagaggtagatataggaaaagttcagggttggatcaatgaagtggctcatttgccatctgccctgcccaaggaagcaagcccaatgaactcagtttgatcctgagaaaccatgtagaggcggaaggacaaaacaaaaggctctaggcatggcagatgcttggtctacatgtcaggttcaaggtcagtcagggctacatagtgagaccctgtctcatggttgttaaaggtcacattctgctatataacaagttgaaggccaccctgggctatatgagaccctatttgaaaagaactctcacttggggtagtggtacatgcctttaattctagaatttgggaggcagaagcaggtggatctctgtgagttcagggctagcctagcctacagagtgaactctaggacagccaggactacacagagaaactctgtcttgaaaatccaaaaaggggggaaaaatagaaaggagaaagaaattgaataagttactaaaagtctaggaagcttaattcccttcatcctcagtttccttggatataaaatggatagcaaatcagcccccaggattatcagcctatagcacaagtatggtcttcacattaccagagcaggatcaagacagttgctgctcctgctaatgaggtaacaccaggcagttttaggactagcagtactagttttggacacacggtggcaatagttctcaagttaacagttctcagcatgccatagaaaactctttgagggctgtggctatggcttagttggcaaagtgcttgcctagcacaccaaagagccttggttccattcccaggcccacataaaccggtgtggtaatacatgcctataatctgagcacagaggaggtggaggtaggtaatcctgagaacacagtcatcattggctacacagcaagtttgaagctaccctgaattactgtcccaataataacaaacaaaacaaacatacttgagcaataacacccaaggcatgtacccacataacaattaaacaattaaaataatcagtgtaggctgtgtaagggtgggtcgagtaaatgcacgggctaggcaaggtttagtatacattgaagtttagtatacatgaagtttagtatgcattaggtttagtatgcattaggttctgtgtttgattcatgttacgctgtgtgcatgtgccagtgtgtgtgcaaagaatatgaaagctgaagttacctggcctgagtggtgactctaggggtgactttggacaagatttagtcttcctcctttggctctaaaatatattcattcattcctatgtatatgatgttagtgccccaatgccatggttcgtgtctgaaagttagagggcagtttctgcgggcttctttccttccacttttctgtgggttctggacattgaactcaggtcatcaggcttgcagtaagtactttacccactaaccatcccactggccctttttgttttaatggctgaaaatgctttgtgcagagctgaccttgtgtctgccctcgggagctgatggtctcagtttccctaaccagccttcactctccccatctcaactagctacagcactccaacttctagagttttgttttgttgttgtccttttgtctgttgttgttgttgttttatatgaagtctcactatgtagccctgactagcctggatctaggtatgtagatcaggctaactggtttacctccatctccctagtgatgagattacagtcatgtaacactatacccaacccattctaattcttttattttttcttcttcaaatatgagtacactgtagctgtctttagacacacaccagaggtgtgcatcagatcttattacagatggttgtgagccaccgtatggttgctgagaattgaaccactgagccatgccatctctccagccaccactccccccccccccccgccccattctgattcttgatgtctcgatttctcatcctctctggtttctttttcttactttctgagctgccatatagcttcctggagccaggttggggtggcaaggtaagggctgaatcagatggtcccagattcgggaaggttcagggctgctcatctcagtgggacccatgtcccaggaaaagtaggaagtgggctgcacctaggactgtcctgtgtagtccagggaagggccctggctcctagctgtgcacagagtacaggatggatgacactgtgtttcagggcccgtgctcttctgggtggccatggtggtgctactggttggctccggctcctttctcctgtgttactggaaggcctgtaggaggcggttccagcagagtaagtgcatgtgtcttggggtcctggggaaggtggctgcattaatctggcctggcctgggtactgctctgtctttccttttcctacctgctcacaccctaagccccaagcctgctgtttttgcagagtttcacctggactacctagtgcagaccttccagcccaagatggagcagacaggtgagtattgggacatgcgaagggctgtctgggccagaatggataggtacatgaccagtgtagggcctggggcctagaccaactcatacaaaaacaaaaacccaaaaaaaaaaaaaaaaaaaaaaaaagccattgtccagcaaggggtgttttgagttggagaagtttcataagtacatgctcgtacctcctaagcgctccccaagcaaggggttttttgtgttttgatggtttcaagcttgtttccatgagctgttgggcagggtttattgaaaccgctgtttgctttcttgacatttttctagtattagagtttccattgccgtcagttaattttttttttgtttctctccaaatgttcatgagaacagtcttgttagaatgagagaaacagagagagaaagagacagagacagagagagacagagagagagtgtatccaaagagtctatctaggccttaagactggcctcagtattgtgtctgaggctagttttggacctctagattcccctgggtcccttgatgtttttttgtttccagggttgagtgagaggaagtgctcacctgggtgagcacacagggtccagataactatattctaggcaaggatagtcatgacctgggcagcgtgggcctgagcaaggtagacatgacctgagcagggtaggtgtgacctgggcagagttggcataacttggatagagtgggtatagtctgggcagggtgggtatggcctgggcagaattatcttgaacagggtaggcatggcctgggcagaattatcttgaacagggtaggcatggcctgggcagggttggcatagcctgagtagagtggatatgatctgaataaagtagttatggcctgggcagtgtgagtatggcctgggcagtgtgggtatggcctgggcagagtgagtatggcctgggcagggtgagtatggcctgggcagggtgagtatggcctgggcagggtgagtatggcctgggcagaatggtcttgagaagggaagggtagacatggcctaggcagcgtgggcctgagcagtgtggggacagcctgggcagtgggtgataaaggagcatttattcatttccttgctgtcttcatgaacacatcttcagcacaggctttgtctaggcacaggcagtcctagatctttcaaacttccagacaagtgtgacagctggtaagagcagacaggcacatgtgttccggccccactaactcctctgaagtgaagactcttattcccctacttgcctgtgagcaaggacctatggactgtgcaggttaatgagatgtctgccatccatcacctgaattgacctgacattaccgcaagtgtccttggtacctttaccaagcacggggaacatctcattttatcctagggtggccttttcagcccctatcactctctttgtttctcagatgactgtgtgaggcacaggaagatgaggtcagctggcaaaggccacgtgctgagcagacagtgagatgaggacttgtcgttactgtcactggagtttccatgaacagtgtgcctcatccttagcaccactgagatttgtcagcttgagccgggcactgtaagatgtttagcaacctgcctaatgccagggtgcacccctcctcagctgtgacagagcccagaatgtccccaggcattcagcccatcattttattctatatttagctaattaactttcagacaggctggcctcaaacttgctacactgctgaaaatgaccatgaacttcctatcctcctgtcttcagcttttgtgctgagattacaaaaaggtgttgtagtggcatgcctagtttctgcttggctgaggattgagcctgtcagttcatatatgttggcttcatacatgctggacaagcactcttcaacaagctgcatccccagccttcagtccttcccctcagcccttcattttaacatacacatgaaattcttgactggtttataaaattatttttaatgatacgtatgtgggggcaggtattggtgtgtgggtgtgtaaatgtgggtgtgtgaatgggaatgggagtcacaggtgggattaaaggtgtgcaccacccgtgcctggataaggattgcagcccctacctcgctgttatcacagatgatggaggctgaaaaggattgctttgctctgatactgtttcagatttccaaacgtagggaacagtacaaaaactgacattttccaaaacagtttttggagtaacttaacagacttgatttcttatcatccttaagtacttcactgtgtgtttcataataaccaggacattgcagtaagaccatcaggatcaaagaattcagcctgttctatcaccaccaatcagtgcccagatcagactggtttgtttcttttctcttctcttcatttctcttcatttctcttcatttctcttcatttctcttcatttctcttctcttctcttctcttctcttctcttctcttctcttcctcttcctcttcctcttcctcttctctttccttcccctttctccctccctccctcccttccttcttttcttcnnnnnnnnnnnnnnnnnnnncctccctccctccctccctccctccctcccttccttccttccttcttttttggtttttttgagacaggatttttccatgtagtcctggctgtcctaaaattcactctgtagaccagaccaccctcaaacacacagacccacctgcctctgtctccttagtgctggaactagaagtgccgtcatacctggtcagaatgggtttttttgatgtgtcccaataacatttttggcttggatcccatgcttccattggtcaccagatctgtggttctcctctcatcttggtcagttcccaattattccttgggtatcaaagccttcacactagggagagtcatgagctgatctggcctgtagtcctgatcttgggtcttgacctctagtacaaactacaagaatggacttgggccatcagtctttgatgctgagatctttggggagcttcctgccacacttccatctgtcattttcctggcactgtgtatttggagcactcttgcaaacccatcagccaagccacaccttgataatgccttggtaatgactggtaaaggagggtttagagatttgtcaataacctgctctgcttttaatcaaggtttgttttcttgttagtgtatgtatatctgtgtgcattcataggtttctttcattattttaatgttgccatcattgtagcaaattcttaaccactgtcccagagctgggtagcaggaatccctccagacatgtccttttgtgttgcgggtaccattttggttttgtttttcattttttgagacagggtctcatgtagcccagatgtcctcaaatatgtcctgtagctgagactagccttgaacttcttgttgtatatgtgtgtcagggggaggattgttgttgttttgttttgtagggtttttatgtttgtttgtttgttgtttgttttttgagagatgttctcactatgtaaccctggccagcacgaatacacagagatccacctgcctttgcttctcgtgcacttggtactccaacatgctattttgaggtgctggggattgtccttttttttcgggagcccttccaggtcatctctccacctagggagtctatttactgagtctactggtcccaattgcaaacttctacgtcagagctgtcctgcctcccacagctctgccatgggactgagagttcagagtaggaacagagctttaaatctctggcactcatgaatctccaagcgtggcctttggagcggatcagtgatcagccagctgagcccggggccactgctgtacagtctgtcctggacttgggccctggggttcggaatagatgtacaagtagattgtgattattccaaaaagcaaggaaaccaacaaatgaggacaagcaggctaacgcaatcgttattttttaagggaagagccttgggcaatctgaactctgcccttggcaagttctactttgggtctttctcagagaattcacaggctgtaacagggcaggctgttggcagaggatgaggccctctagattctgccctctattttttttaatgtaactctttttttttttttttttttttttggcttttcgagacagggtttgtctgtgtagccctcgatgtcctggaacttgatttttagaccaaactgaccttgaactcaaagattagcctgcctatgcctccctctgtagtgctgggatcaaaggtgtcaaaggtcgccactgcccagctttagattctgcttttttttttcaccttgatgtaaatacatgcttgtttctgaaagttagaatctatacatttttttctcctgtcatagaaaatctaaactgtgttagcaaacctggggcctcttacagggggtcctcagccccttggtaatcatttagcttggaaaaatcctaatgaggcttcactttttagaagaattttaggataagaggaatccgttccttccatctctgacactgtgcggtcagtcccatcacaaagctgcaagaggcaggagagcccccaacacagaaatctgcttttggagacctaacagacttaatcaatgggttccctaggtggagagacggcctggaaaggctccagaaaagaggacaatcatcagaacctcaaaatgtgtagtgggacacacccggagttccagctcttgggagacagaggcagctggtttgtgcctttaatccccgcagaggcaagtggatctctgtgtgttcacagcagccagggctacatagtgagaacctgtttcaaactcagatgtgatggtgccatttgtaatatcagcacttgggagtaagggagagagagatcgggagttcaagatcatccttggacaagttcgaggccagcgttttacgcctctcctcaaactgagaaaataatggagtcccaatgtggccatgcccaaatgattttattattgacttcttctaatggggttacatattagcacatttaaagaaataaacagtaattatcattttaatttttaactatttaaagtgtatatgagcatttgcttgcatgtatgtaacaccacaagcatggtgcccactgaggccagaagagggcactggatccattgaaattggagttacagaggttgtgagcggatgctgggaaccgaatctagatcctcctgaagagcagccagtgctcttaatgtctcagccacctctccagcctcaaaatattgtgattaaacaacaaaagacacacttattatttctttacttggtttctttttaaggtgccagggacccttcttatattcagtcagacatctccttatgctcccctgtgaaagcttcttagacttttgacctaagtggcctttgacagcactggtcagacattttgcaggattttgcctgttgggatttatctaaaattcttttgcacaatgagaacagggttctggatttggggacagaaaaccttagcgcacagagccctgtcatcacaccctgttctccaggtggctaatcacaggaaccctactgtgtgtgtgttgggtgttggggggagagaacacatggatgagttcatggtgtgaatagagtcctggccttcacatatgagagacaattgctctaccactaatgcctccctgactctcacctcctgccccatctgctattttgagatcctctatcttcataaaccctctccagagttagccaggtttgtcccatttcccatataaaaaggctgaatcttagaggaagtagggctagtttccctccagtgaagtattgtgatggatggctcagcaacagtattgtttggcatttggcatctttccaattttaaagtaattataaacactcctgcgtttgtcttcatttgtgtgacttcccaagggtgtggtccatatcgggcagggaggggccatgattcaaaggtcacaagggttttagccaaaagaccctgtaaagagatggtacctacttacagtgtttcagcttctagcctacctgcttttttctcaagacagagtttattctcttgcttctttagcacacatttttttttcttccccaggctcccacaatgtcttggcaccacatgttagttggctgattgcaaaactcaaggttgtttccaaaggataaagatttagttttactgataaaacttttaaaatgaccacttaaaccctgtctcacaagacaaaaatccaacaaataaaatgagcaaatcctgggctgaagagatgtctcagtgcttaggagtgttagctgctcttttaaaggactctggcggatccaattcctagcaccctaatggttgctcacagttgtctataactctagttccagggtatctaaaaccctcttttcatttccatgggtaccagacatacatatggtgcacaaacacacaggcaggcaaagcactcgcacatgtaatataataaaacatgcatacatacacacacttgtgtgtgtgtgtgtgtatgcacccatcaaacaaaacactctgtggtctcaagtcagagagtacctaaagtgtcagtgacttggtctgggtggttagtaatcacctaaagagaacaagccatgacttcctgaagtaacacttctgctggggacggtggttgccaggttctgtaagcaagtggtacatttgccaatctgagactgaacaccactctagcccatttacctgccagacctctaagacttcatcccaaggtgcagagtgctcaaataacattttggtttgttcattgttggttaatctgctgtgcatatatcaattaggattcagggtcaaactgctaagccagaaagcatgttctagaagcagctcaccaggcatgctggccttaacagcatgaaccttgatggcatcgcagggaccctaactgaccccttgggagtcagtaatggatctgtccccctacaggattgtccctgatggacctgggatagattgggttgggttgaacttgatactgtgtggctacttcctcctttctcagggagctggtgagctaagtttaaacgttataatgtatgtgggtatctggtctctatttaagacagaaggataccggggtgaatggcagggcctgaggtgggcagagaagggttgtgttctgagaatgatgacccaggcatctccagagccctcagattggtggtacaaagagaaatgaggcagacagaacaggagtgtcctgcagaagggttgcagtctaggctgtggaaaggaggccccagcacactcctgcctcagaggctggcttcaggcatgccaaggactaatccttaaattgtctactgccagcctagggcttgagccttggagagggccaggctcagccccactgagatcccagggtgttcccagggtgctatctgttaacagatgggaagtggtagagggatgtcagactgtctttggtgacatttctactctttttttttttacagattcctgtcctactgaaaagctaaccgtaagtgccatctccacccacctcagcctctgtccttttttaagatttatttatttactatatataagtacactgttcccgtcttgaggcacgccagaagagtgcaccaggtctcattacagatggttatgagccaccatgtggttgctgggagttgaactcaggacctctggaagaacagtcagtgctcttaactgctgagccatctctccgtcctctgtccttttgtttgactactttccttacatgtctgttgattcggggctgctagggccatagaaggaccacagagctatcctcttccctggcacccaaggttactggtcaagaagctaggtacccagggtgttggcctggggcccccttggtagggttcaactagagagagagggctccaccccacagcaacctccagctcctggctcagccccaggggatttccagcagggattacagacaacagcttggtttgggccattttaagatacccagtctagtctggagggaggctctcttctttcctctgggactcttgtctgccaagtgagaccatagacaccagcagcacacacttacaaagttagctatactttgagcattgagcatttaccatcggctaggcacttgcactccctcttcagctgtctcttctttgactgtgcagccatcgctgaccttgaaatccaagtgtgagcactgcttccggcttgctagaccccctttctttgtgctagacattgccccagagtccttctgactctcaggaatggttactcttgccacatttttggtaaaagaggaagtggcaatccgacaagtcaggagcagttggtggctccattagaatctgcattgtgggagttcagagctggtgctgggccctgtgcccctagctgcctccttggagatcaggggtaggagcacatgcatcgtctcttacagaaggcttcatgtgtgccaggttcagggctttggggaggctacacacaattgctgagtcctctttagccttgtgctggagacctgccctgtgtctgttttcctggggaacatgtgatgatggggctcccctcaccccagctgagggaggggcggagggagggagggagtgcaggcttcaagatgaggcacctgtctgtgccacacactttttgctttttttccccattgatcaagtcgcttatcacttttctctctctctctggcatgcttgcttgctttcacaacagcttttttctttttccttttttttttttaatcaatttacacgttttgttttgttttgcttttcatgcgtttgggtgacttcttgcatgtatgtctgtgtaccatgtacatgcctagtgcctgtaggaataagaaaagggcatcaaatcccctggaactggagttacaaatggttgtgagccactgtgtgggtgctgggaaccaaattctggttctctggagaagcagccagtgcggtcaaccacagagtcgtttttccaaccccaaattaatttgttttttgagacaagatctgatgtagcccaggctggttataaattcattatgtagctaaggatgaccttgaacttctgaccctccttccttcaccaagtgttaggattagagtcctgcaccatgtctggctaaaattagtggaagggagggtgaagggggattcctgttctgggaatcagatcagagtgctaggaaaactctacaatcctgagctatatccccagccctggccttcaaattattgtaaaagaataatcaagattccatatatctgttctctgaatctctcaccctgggtcctttcgaagactgcagatgaatgccacacgccaggtatttcatttccctttgtacttactcgtaaacgtgagaaactgggactggagagatggctcagtggttaggaacactgactgttcttctgaaggtcctgagttcaaatcccagcaaccacatagtggctcacagccatctgtaatgagatctgacgccctcctctggtgcatctgaagacagatacagtgtacttacatataataataaataagtcttaaaaaaaaaaaagaaaaaagaacacaggaaaaaaaaaccacaaaacacattttttaaaaaaaataaataaataaataaataaatgtgagaaaccaaactaacacatttctaaagacgtggctcttttttttttttaatgtattaagatgtggtcaaagacttctctcccagaagttgagaatgaagaggtaccaggagttggtgaggctagaggagactccagcatgtagatctttggttagaaacgtactaactatatgtatatacaaccctggctgagttactcgactctaccaggcctcagattttccatccgtaagatgtgcaggtgctaatattacaaccacgcagtgtggttttgagaatggcacatcactcttaggactagcctggatgtagcgagagtgtgtgaaggactgactgctgctcagcacagagtgaaggcaacatgagttgagggtgtggctcagtgggtaggtagagtgcttgcctattaggcaggaaaccctgtgctggggtcccagccattcacacactgggtgtagtagcaccataatctcagtcttgtggagatgaaagcaggagggtcagaggttcaaggccatcctcaggtattatcaagtttgaggctagcctgggctacatagactgtcacaaaggcaaagcaaatagttgggtgcacacctttagtatcagcacccgagaagtagaaataggtggatctctgtgagttcctgggccagccagctttatatattaagttctagatcagccacggctatatggtgagatattatgtccactaaaaaacaagcaaacaaaagcacgttaaaaaaaaaaaaaaaaaaaccctatattcttgggtatgctacacaggtgccttatgctgtcaagtagcttgtggcaactttaaagaattttaaaagcttttcacagccttcccaagcctgctcagcccttactcctgttcacagcagccacagagaagcgggtcggtgacagatcccagcacgggacacaagttgagcccagtgagccctcctccagctgtagagacttgtgccagtgttggggccacctacctggagaacctgccgctgctggatgacagcccagctgggaatcctttttctcccagggaacctccagagccccgggtatccacggaacacaccaataacaggattggtgagtcctgttgggagatcctggtctaatcatgtgggcagatgggagatgggtgctgagctctggatgggacttggggagctatgcattccttgccacccttcactctgccctacatcaagcttctgtccaggaagaaggccagagtgacacttcgtggggagaactggggacattcactaagagggcacggagtgatgaacacagtgtgtgtcatccttaaagagaaagagagtctttccccactggcctaatacagagccagaaggttcggaatgatgtcagacccttatctagcaacaccacttcatgtctgtcacaacctctgggaacaatgacatcaccctctttcatggctggagaaactgaggcatggagtggggtttcttcttcagttgccaagactcagccccacatctgctgggttctggaacattgattttttttgttcgtcgtactcatgggtctcagcggaagcctagagaccagccctggccctcctgcatttctcctctctgctgccctccagccaggaaaacatctgccatggctcctatgggccctgcttccatcctcacttcccaccacttccgaacatgtatcagtggttcctaacctgtgggttaacagtagcaacattacagttaaggagtagcaatgggaataatggtatggctataggtcacagcatgggggactgtattaaagggtcacagcattaggaaggctgaggaccgctgatgtatattgtccccttcactctcaagttggaatgttaggttcttattctggcattcaaggatggtctcagccagctgttccatcccttctgaggcatctgttctccctctgaggggcagctttctgaattttcatctccctctccctggcttctcccctccccctccccctctcccctcccctttctccctaagctgctctgcagggttatttcctctactatagcaggccttttgagcctggttaccccttcatgtcctagaggtagcattctcacactgtctactctgaacaagccaatgctctcagctgagcttctccacccagtgtcccagcccccagctaggtgctccctagagtgctgctggctctgttctgatgctagaaggacattggtgacagttcttcacattcccctggaagtctgtggtgatgagagctctagagctgtcttggtctcaaagaaatgtttgcagttaactgctctcggttaagctctatttgaaaagaatgtgtttggaaaaacactgccaaaggctccttcagttttccaaggagtcctgatggtgtttgaatccaagatgactaaagggcttggaacttggaaacagggccagagcctgttcagggagggaggtggcaagggttagggatgaggaagggctgctgagggaaggccttaagaggtcctctgggacaccagaactcaggtgactcatttgtcctctgagtgacacaccagaagagcagtctccccatccagtttcctacaaggacaaatgggtctaagtttcctccttctctggctgtacccactttgcctcttctttccttaacttgactggggcattttccccagagctggggtgggggtggaatctaagcagctggaggtaggcagcctgtgatgataaagccagaggatcgggctccataggcatgacagagcagtagcctgtctctgctctggccttggtttcttctgccctcacacctcccgcctcacatacacattactctccaatacctctctgtctctctgtctctgtttctctctctctttatttattggggggcggggtgtcacgtgtgcatgtagaagtcagaggaccacttatacatgtcagttctctccttccaccatgtgggtccgagggatcaaactccggtctttgggtttggcaacaaataccttgacttactgagccatcttgaaatgctttcatctcatacatttagtttgtgtgtatgccactgcatgagtgtggaaatcagaggacaacttgtgggagtcagttctctccttcaactctgtgagtccctctcatagctaaaatgaagtattttaactagcccatataaaagacacacaatccaggtatcttatttacaagccataatcctagactgggcagatttggggctattctaacttatgtcccagccatatgtcccttgttacttgatgtttttcccggccatgtgctcatggttcatgttttctcatgatggccttctctagtctctgtgtcctttcttcttccctctctctacctgcaaaccccaaccaggtagctgaaaacccgcctacttctaccttttgcccaatcacgggccttagctttttattgaccaattaacttgaggagcaaggttacatagcaaatgtggtacacatgaggatctcctcatgccttgtgatctccttgtgcggggtggaggtagccagatggtgggagccaggatttagcatttgaatacaagcagcatccgcctaacctcctacagtaacctcttcttagttgaccccagtaactgacctctggtcccatctgttctttttggtaccagggattgaacctggtgccttttacatactaggggaatgctctactactgagctagtccactcacctttgtttggtttaaattttaatttttaaaattaaaagctgtgtgtgggtgtgtttgagtgtgtgtgtgtgtgtgtgtgtgtgtgtgtgtgtgtgtgtgtgtgcgcgagtatatgtgtgtgcatgtgtatgtgtgcatgtgnnnnnnnnnnnnnnnnnnnnnnnnnnnnnnnnnnnnnnnnnnnnnnnnnnnnnnnnnnnnnnnnnnnnnnnnnnnnnnnnnnnnnnnnnnnnnnnnnnnnnnnnnnnnnnnnnnnnnnnnnnnnnnnnnnnnnactcatttggctgttggagatctgaactctggtctttgtgcttgtataaccagcacttttccttctaggttatctccccagccttgttgttctctggattgtttttgttttgttttatttgtttgtttgacagggtctcctttagcccaggctagctttgaactggctttgcagccaaggatggccttgaacttctgaccctcagggcttgtagcctttgatattacaagcctgtgatcctgcatgtggcccctgctcccttttttctttttctttcaatcagattctttgtctgtttgtttgtttgttcattgtttttgttttttgtttttgtttttcgagacagggtttttctgtgtagccctggctgtcctggaactcactctgtagaccaggctggacttgaactcagaaatctgcctgcctctgcctcccgagtgttgggattaaaggcttttcaatcagattcttactgagttaccgaagctggcttgaactcactcattctgtagcccaagctagctttgaacttgccatcttcttgccttggcttctccacatttacaggtctgtgctccccagctttcatctttcgctagcccctcagatgaaagtcccagcaaaccttgatggaggatgtggcatggcacctgagaccctgctctcagctctggagcccatgggacacacagttcgtccctttctcttgcccttccctctcatgtttcttacacttctctctttcctgggtgtgtgagaaaccgaaatagaagagctgccatggtgcaatgctctcggacatgccggggcacttgagaatcttctgggcttcctgaatctgagggtgtaacccaaaggcagggggtccatgtgccccctgcgtctacccacccccactcctaagttcccttttgagcttccccattccatctgcagaatccattgcaggatcagcagagtggtacaacccccagcctgaggcccagtgagtagagctggttattctggtgaatctaggcttctgcctcccagttgcaaagatggctttgtttccctaaggctccctgactccctgcatggaaaggccatcccagcaacccccagcatcagcttgtgttgagactgtagcatgtactagtgctaggagcctgggctacccattcacttgacactcatgatcccctctgccttctggcagcatgaggtccaggggctgggcacatagacacatggggcccctggctgctgttgcatatcatcaggacccaggtttctggagaacgtggccaatcagccaagtttgcctggactgatgaagctcttgggacctggaactcatctgtcccaggcaagcaggggcacactggtcacccggggtgttttgttttaggcatgtggatgcaagggcagccaggtggctggatgcttccttggagatgtctcctaaccttacctgctgacctcaggttctttaagatttatttattctatatatatgagtacactgtcaatcccattacagatggttgtgagccaccaggtggttgctgggaattgaactcaggacctatggaagaacagtcagtgctctttattgctgagccatctctccagctccctgacctcaggttcttaaccatgcagaggattagattagtggatggtgaggggctattagtgggagtgctgggtctcagagatggcacttgagaagagtgagggacatgtgtggctctgatttgtcccctggtgttcttactaccatcctgcttttctttacctgctatttcctggactgactgcattctgtccatctctgatgacatgcctaagaaaccatgggtagccccatcaatacctctctgtgtaacagagaggctgtggtatctgtgcgaagtcacccagcacatgaggtggtcctggtctctcctctctcacccacctttttgccttacagagaaaatctacatcatgaaggccgacacagtgatcgtgggctctgtaaaaactgaagtccctgagggccgggctccagcagggtctacagagtctgagttggaagctgaactagaagtggaccatgccccccattacccggagcaggagacagaaccacctctgggcagctgcactgaggtcatgttctcggtggaggaaggaggaaaagaggaccatgggcccacgactgtctctgagaagtgacaaccattgttagctggggctagagagcagctgagtgtacccttgagatcaagttagcacctgggaagctaccacaacttgaactgaagacccagcatccaaggtagcccagaatgaagccttcagctgctgccaagagcactggcccctgggccccatcagtgggcactcaccatcaggctgatgtctactgggggagaagccacaggcttgatccaagcttccttgcccacactcctatgccctgccttctctccttgggtctcgagtgatggctttactgccatgctattagcctccagctgtagacatggctccctgttacagaaccagcacctattgcttctactcttgagacagagggaagttaaagaatgaatgctcgtcatcactggcacaaggatggcctgtacccatcacacagggagggcagaatgagacccttttggcacagcctccctgttctatggacctcctcagcagctgcagtgaccccacctgacaagcactgctcaagactatgctttgcccaaggacttcctgtcacacggagatgggagaactgtagtcctggaggttcttaacactttgtgccattatctgttccaccctggaaacgaagaagcattgtcccaaagcctccaggatcaggtccaatgacacctagctcccaaaggaaactctagcaagtgggagcctatctttgaaggtaccctgctgctcacactgcttagcccacgcccactgtgaggaggccgttctggtgaacatacctgaagatctgcttttaatgttttgttttgtcttgttttccttttgaggtactgagcttgaacccctggctttgtgcatgccaggcaaatgttgcagggctgatcccacccaccccagaccagcatttcatactaagcactaaagctgctgtcactcacagcctggctcacccactggcagctgcatactcttgtatcaagcagccaactggatgacacatctgctctgtggcagcttggagactctggacttacccttgggccaggcagggagaattctgtttactcactagctgtttgctgtctggaggaagttgggaccctgtcaagaatcacgaggggagtttctgaaaccgcctgaatatttggggaaaaactggagcagctgagtgccatcagaggcgttataccacagtctggatccaggccagaagggatgtgtgggggatgaagagttgcccatttgtcttgtgcaaggacacggtggatatgtgggcatacacagtggccccaaagccatgtcatgatgaccacatggataccacacttttggaagatattgcccaactttttctttttctaagatgagatcttgttctgtatcctaggttagattcaaacatgatatgtagctcatgctgaccctgaacctgtaaccttcccatcttaacttcctgagggatgacaggcttgagccactatgccagactgccacacatttcagcaaagtgacatattcccttacagagtggctcttcacacaatttttgaccctctaagaatccttaagggcctgttaaaacaatggatttgtaaggctgaaggcttatcacagagttgagtagtgagaggtcctgaacacgaagggtgccaggggtctggtctgccgccccacccccacccccacgccatttcccccaggcagggcttttctctgtgtgcacgatactcacagccaagggcaggagcctttgaccagctgtgtgccctttaaatttctccctgtccacccgggcagtctctttttccctgtttatgtcctgtcctccaaggatgctgggaataaagggtctctgctcacacggctgcctttggtatttgtagaatgaatcgctggcctctccaaggctttcttcccacaagcaggtttggaccatgcaacttcggaaaagagggaactccatgtagctggtggagccgtgggtctctggaacccaggtcttgtatggctgagcaagttccaccaccctacacacagaacagggcagagctccagctatatgcagccagaccagagtttccccctctctggcatctgtcctctccattcctaagactgtagcccagacctgcacctcacctttagcctgacacagaacctgctgcttgtttgccatgtagtcgggccaggaaccagagctcccctgatggggaacttcctagctctagctgttctgatgttcagaacagtgaagaatcaggcccctgttctcaagggggcaatccctgtgcggtgagcgaccctgcccccatcacttcctgagcagttatctgcagttggtgtctagttctttgatgctgttgctttccaaggcagttgggtagaatctccaggacctgacaccagtctctccgatgggacaaaagggctgtcccccaagttgccccttctccctcttgacttccttcccaacagtgagtctgcaaggactatgtcctggccatctttacttgggcagtgttgcactgagctgagtatacatgaaagtgtactgggataatggaagtccccagctacagttttctacatgtctcctcttgcatctgggggattggtgctcagagtcaggttcaaaccccagttctctcagagaccaatagggagcttgtttgagaaagtggaggccaccaccatctgttgctatagcacaatgtttgagactgggaaatgtattaagaaaggttattcgggctcatggttctgacagataggaaatccacaaatgagcagcctcgtctaaggaggcacattgactcactgtactgggaaaaacagggcaagtaggttaaacatgaggccgaactgttctcacagtagctttcagtcttcagacagtgtggattgactcctcaggggcccatggagttttatggactatgagcacccttagtgaccaaaccttcctgtggtcttcaccttccactagtgctccaatgtcagtcagatctcagcatgaccttcaatgagcttcactatactcaccttaaggctctattttctcatctgtgaaatgagtattagtcttgacctgagaaggctgtgggcttcccagagatgccactcatgattagtgactttagtttttattccatccaagtggtcacttggtccagagtaaccctttcctctagcatataagagggtccccacagaggccacaagatagtacacataggtttcaggaaaaaaatatacttaatgatgattggttctaaagctagtcctccaaaatctacttttagtctagcctgatactttgcctctcttgtagcctcaacaacagtgcaggttacttcttgctgaatgaggaaccctgggaactcttcagttcagtcagaggtctatctgtgtgtctaaaaccctagctatttatttgaggtccctcctggttctagtgccttccggaacacactacattctgttcaagatcttcttcttcatagcagccctttttcaaaaacacatacactgaggcaagcccagctagcaaagaatttctggcacacagctttcctcccagggatcctttgtccagcaggtgtgacattggcttaagcttaagatccagtctgtgatgtggtggtgaacatgttagtaaagtagagacagggggatctctgtgagttttagtccagctcctgggtagtcagggctacatatagagtccctgtttcaagcccagtttgtgaattacccctatttgggttccaggacagaggcaagacagtgtctgcaatgacaaggttggggacagcttcccaccaacactgtagttccacctgagtgaaataagccagctaagcttgaatagccgtgaaatgaaagcaagaatagccagtgcaaaggctctgaggtgaaaaagctcctggacttgagattcaggaagaatatagccatacaggaagcccagtgtgtggagagaaaggaggtgggtggggagaacttgcccagcgatgcctgctgagccattacagagcacttagggtgtatcaaaagaacactgttccatgctcagttttatggtcctgtaagtacaataaacgtttcagatggagtgacaaaagccaaaccacaggggcatcaaaagtcccaagagcagatttcaggggaaacttaagaaggctggaacaggaagcagctgagcaggcagcccacaacattcccaggtactgctggggagctacaggagaagggttcagggaggacaaggtttctctttcttctgggatcttccaagtctggatggagaagcctggagaaggcttggagaaccctgggcattggttatcctgtcatctgagcaccacaggatttatcagtagccctgacaaagcatggggacactttgtcatgggaaatagtggaggttatggctacgggcgagacgggcctccagggttcagtttcagctcagccagttcccagccacacagtttcacactcttgccacttgtttccggactgacagcatggactgaactctcacctggcacgaggctgggatgttgtggggataaagtgtctagcccagctagcagttttcatggtcactattagctgccttttcagaccgtttgacttcaccaagcccttctttagtctgtgtctgcacctaggatcagtcctaggtcctaggtgcctgcttctctgggctctgagtggaggctcactgtcccacacttgcatgtttaaagagttggagtgcatcctctcaactccaactccagttcccttcctggatgcaggtggcctggctatctctgtggtgagaagtaagattgatgctgtgagcgttataagccgctttcaggcaagtttcagctgggagttgccacctctgtgtgatgtgaccaggctctatcacacatcccctgccttgatggactggaccttgagggaccaggagccaaatttcacctttccttccttaagttgtttcagttagattgtgatcacagtgatgtgggaattaaggaggagggtgtgaggtatgtgtgttgcacatgtagatgtaaggtacacacttctctgtctctttgttatcttacccccttgagacagtgactttcactgaatctggaactaggctggcaactagcaagccccagtgatcctcctgtctccacccttcatagatctgggttgtaggtgtatgtagccacatcctgctttttgcatgggtgctggagatttgaacccagcccagtctttatgcttgtttattaagtattctgtcttacttaaggtttctattgctgctatgacacaccatgaccaaaaagcaagttgggaggaaagggtttatttgccatacacctccatattataatccaccaccgaaggaagctaaggccggagctcaaacagggcaggaacttggaggcaagagctgatgcagagtccatggatgagtgctgcttactggcctgctccttgtgacttgctcaacctgtttccttctagaacccaggtccaccagcccagagatggcaccacctacaaagggctgggccctcccccattaactactaattaagaaaatgccctacttgcttgattacagcctgaccttctggaggcattttctaattgcggttccctactctctgatgactttagcttgtgtcaagttgacctgagactaagtgtctaccacatattcttacttacttagccatcacctcacgttttgtgcatactcaacagggattttaccaaaagagctgcacttccagacccttatgtgatattctgtccccttggattatagggatgccttggatcttatagatccagagagctgggtcagagactaagggtgcttgcttccaagcctggtaacttgaattcaatacctaggacccagtagtagaagagaaccaattcctcttatacacacacacattcacacacacaattcaaaataaataaatgtaaacacatatatttataattcttaccagctacttgtctttctttttttagataaggtagtgtagtattacccaatttagtcttgaattcctagactcaagtgccagtgtagggatcacaagtcctgtggtcttcaaatatgacatgcatcgtgtttgctctatcactagcaagtagattcagagcctagaccccaggtaccagaagtcttacacgcgttctcgcgaccagccaggaagaacgcaacaaaccggaatcttctgcggcaaagctttattgcttacatcttcaggagccagagtgcaagagagcaagagctctattgcttacatctttaggagccagagcgcaagagcgctagagtgcaagagccagagcaagagagagaatggtgaaaccccgtccctttttaaggagaattatcctccacctaggacgtgtcactccttgattggctgcagcccatcggccgagttgtcgtcacggggaaggcagagcacatggggtggaaaactacccttggcacatgcgcagattatttgtttaccacttagaacacaggatgtcagccccatcttgtaacggcgaatgtgagggcggctccccacacggaagacttttgagaacaccctgtgtatcaagcctattcatttcccttgactactttgaggcttttgtatctatgtatgatgtgtgtgtgtgtgtgtgtgtgtgtgtgtgtgtgtgtgtgtgtgtgtgtgtgtatccacatgtgagctcttgaatttctgaggttgaagaatcatactctgttgtttttctcctttattctttgaggcaaggtctctcagtcaagctcagatctcactgatgtggctaatcttgctagctggcttgctctagggaatccctgcctctgtattccaaggctgaaattacaggtgggtttttactttctccacgctttgcccagcatttattctggtttctggagatctgtactgcagtcccctcactgtatggcaagtactctaaccacctagccaggtctccagctctggattcaagtctttctgtctcaagcatgtgctctgtagtcctcaggaatgtcttgagcacacaagggccaatgcacacacaaatgggcagggatgagtttcatactcccttgtctgactcaagaacattggtggctccatttagtttcttttcagaggggaaaactgaggctctcagagctcatgcctggccacctgagcaggggacaggatctggcatcttctagagttggatggaccctctctcctgaaacccaatggctggtcaaactgcaaggagcctggtcaggaagtcagagttgcagacagattactcaagagcgggatgtcacaggtcgtggttttttttatttgctagctttggaaatgccaggagcttcaacacacatcagggaaggccccaccctggacagagaccctcagcaaattctggacattcacaagatgaaccagtgccctgtggaccaaggtcagtcatcagatttccctgaatgtcacttgacctttctgggtcgcacaaaggggcctcatccctgcctccatcaactcatacatgttatgaggagagataggaccaactccctctaaggcttcttgtattctctcccatgaacctcctgacaggatgctcagaagtggtggctacagatacccctatgctgctgtcgaggaaactgatgctcacagctactaaatggtgcagacaggattcaaacccaggtcacctggccaggactccagttcccagccacttggctgtgatcaactgtggctcaggcagaggtcgcttctgggtttttttcttttctgttgctgctttattttatttgacacttttactactgttgtggaattggctacagggatctaagtcacacgctacactgcctgctttgcctggtcacaataggaatgctaagccctggagaacacgttctggatccagcggctcagaaattcccagacaatcgttgcctcctggcttgcacttcctttccaaagccaagtgctggccaagtgcatggaaccttcagtagctccctagggccactgtctactagtctggccctccacaaacatacctgttagtttccatagctctctgtcttaactgtgtctaaggcccagttgtgacccttgagtggccagcatggaggacactccccagcatgaagtatttgctcagtgctgacatcctgagcttcacttgctcacccattccttcctcttccagagattttccagattacacagttcccaaagcactgactgcttgaggaatggaggccaagtctcagaaacccagaaaaaaaagaaaaagaaaaagaaaaaaggaaagaaaaaaaaagatctgtgtctaagaagaaggttttattcttagtcactgttctattgctgtggagagacatcatgaccaagacaactcctacaaaaggaagcatttaaccaggggcttgcttacaacttcagaggtttagtccattatcatcatagcaggaagtgtggcagcaggcatggtgctgaagaagtagctgagagctttgcatcttgattcacaggcaacaaaaaagacagagacactggggatggagttaaagtccactcccagtgacacacctcctctaataagaccttctaatctttccaaacaattcatcaactagggatgaagcatgcaagtatatgagtctatgaggaggcacattctcattcaaaccactactcatttgctcattcagttgctcaatctagaggcctgtgtggaacagctatcatgtatcaggcagggagcactatgaggcagggtactgggtgttgaggaacattgaaaggatgggggatgggtggtgcctgggtatgcaggacaactctttgagtgtcaaagaccacctgggaaaggaagcctgcagggaaggccttgaccttagggggcttggagctttatagtcaagtagatggcacccagggaaggcttgggttccactctctcctctgcagagtacttctaaaaagcatgcccacaccaggaaagttgcattaaggtggaacatatcttattttgttaaataaatatttatcaggccgggcgtggtggcgcacgcctgcaatcccagcactcgggaggcagaggcaggtggatttctgagttcgaggccagcctggactacagagtgagttccaggacagccagggctacacagagaaaccctgtctcgaaaaaccaaataaataaataaataaataaataaataaataaataaataaatatcaagcccaaactgcagggtcatgatgcttagagccctcacggacagccaaaaatctgagctaaccttacctggtggaactgataaagtttatggtgcgaggggtcgggggaaacctcagggtaagtcgggggtcacagtaggacttgaggatgtggcccaagtttatggggacatgttttagttacttttctcattgctgtgacacactacttggccaaagcaccttaaggaaggaggtatttactttgtctcacagtgaggaaggcatggagatgggtgcgtgaggtcgctgctcacatcgaatctgcagtcaagacacaaatgaattctgctgctcttcttaccttcccattcttgttcaatccaggaccccagcctttggaatggatctccctacacatatagggtgggtgctctctacctcattaacccaatctagaaactccctcacaggctcgctcagaagtgtgcctcctagatgattctaggtcctgtcatacatgctccaggaagagaggcaggggtgctgggcgggcagtcatccggaagttgtactgaccttaggagggcctggagacactggcaccagggggttttccttctagcctgtagcaggaaagcacagctggcatttcaggaaacccttccctacaccaacatgttctaagtctgcatttatttacttattttttatagcaggaattataggcatgtacgtat

SEQ ID NO: 152 - DNA, 1500 bp, Mus musculus
tttcaccgcgggagagtcagggtgccggcaggtggccaggcgctggagactcgggaagccaagatgagcgccctactcaccgcagcagggttgctgttcctggggatgcttcaagccttcccaacggatcgaccactcaagaccacctgtgccggagacctcagccactacccaggggaggctgccaggaactgctgttaccagtgcccctcagggttgtctccgacacagccatgcccacggggtcctgcccactgcaggaagcagtgtgcacctgactactacgtcaatgaagacgggaagtgcacagcctgcgtgacctgtttgccaggccttgtggagaaggctccgtgttccgggaactctcctcgaatctgtgagtgtcagcctggcatgcactgctgcacaccagcagtcaattcctgcgcccgctgcaaactccactgttctggagaggaggttgtcaagtctccaggcacagcaaagaaggacactatctgtgagctgccttcctcgggatctggtcccaattgctccaatccgggtgaccgcaagacacttactagccatgccactcctcgggccatgcctactctagaatccccagccaatgacagtgcaaagagcttgctgccaatgcgggtcaccaaccttgtgaggtaatgcagagaagaatatgaccttggagcttccatctccagggacactccctgacatcagcacctcagaaaacagcaaggagcctgcaagtaccgcctccaccctaagccttgtggtagatgcctggaccagcagcaggatgcagcccacctctccattgtccacgggaacaccatttctggatccagggcccgtgctcttctgggtggccatggtggtgctactggttggctccggctcctttctcctgtgttactggaaggcctgtaggaggcggttccagcagaagtttcacctggactacctagtgcagaccttccagcccaagatggagcagacagattcctgtcctactgaaaagctaacccagccacagagaagcgggtcggtgacagatcccagcacgggacacaagttgagcccagtgagccctcctccagctgtagagacttgtgccagtgttggggccacctacctggagaacctgccgctgctggatgacagcccagctgggaatcctttttctcccagggaacctccagagccccgggtatccacggaacacaccaataacaggattgagaaaatctacatcatgaaggccgacacagtgatcgtgggctctgtaaaaactgaagtccctgagggccgggctccagcagggtctacagagtctgagttggaagctgaactagaagtggaccatgccccccattacccggagcaggagacagaaccacctctgggcagctgcactgaggtcatgttctcggtggaggaaggaggaaaagaggaccatgggcccacgactgtctctgagaagtgacaaccattgttagc

SEQ ID NO: 153 - protein, 275 aa, Mus musculus
GNAEKNMTLELPSPGTLPDISTSENSKEPASTASTLSLVVDAWTSSRMQPTSPLSTGTPFLDPGPVLFWVAMVVLLVGSGSFLLCYWKACRRRFQQKFHLDYLVQTFQPKMEQTDSCPTEKLTQPQRSGSVTDPSTGHKLSPVSPPPAVETCASVGATYLENLPLLDDSPAGNPFSPREPPEPRVSTEHTNNRIEKIYIMKADTVIVGSVKTEVPEGRAPAGSTESELEAELEVDHAPHYPEQETEPPLGSCTEVMFSVEEGGKEDHGPTTVSEK

SEQ ID NO: 154 - DNA, 100762 bp, Homo sapiens
  misc_feature (1)...(100762): n = A,T,C or G
ctcagaaagaaccctggcgcctgtgcagtgtcagtgcaagccaaggcagtggctgctgtttccactgccaagcatgagagtgggacgccagccagtggccgggctcaggccccaaggaaacacaaggtgggctgctgctttggggacgttgtttggagtcacttgaaatgcaagagtgacccccagaacacacaggccccccaggaggtggatgtggggtagacagcacaggccatttcttgctaagcatttatttccacactatctccttggacagataacaggattgttttcaggtaataggtagataagctggccgggcattggggatgatggatgctgagtctgggaggcaagtgtgtgctcacacagatgtgtacgtgtgtgtgcatgtgtgtgtgcctatgtgtacgtgtgtgtgcatgtgtgtgtgcatatgtgtatgtgtgtgtgtgcagcactgaaacaggccgctgaccgctcccaaagccctgatgttccatcagcctctgcagtcacagccaagcagacccttgagacccctgccatctgcctcccttgccagagtctgaaagcttggggtcaaggctttgctcccctggtgacaggcctggaaaaggaaaatgatagcaagcagcaaatacacacaataaagccgggcgagggcagaggggccgggtgggggctcaggaggctggggcctgggggctgtccctgcactgactggctgtgggactttggcctcagggtcggtgtaactggggtaggggagcggttgctggatgtggcgacccccacctcagctctcacactctggccagtgtctgatgcaaaccagaacccagtgaaatcaccatgagtcgatgggggttatggatggtaactgatgggtttttctcaggccagatcacagttccagtcttcagggggaggtccccatgagtctccagatctagctgaggcttgagttgtggccacgccttagtttctccacattgccagggttttgtgtctggtgagccccaggccagactgggccttcaggcctcctgcctcctgtttggagggagggatgattctgggagnnnnnnnnnnnnnnnnnnnncccactcccagccacatggagggaatgaccagggagattccagagggattttctgaatgaatgccatatgctgatgggcagctcctgctaggaacagggtccctgctggcactttctgcaggcacccacggcatggatgatggcgcagatgggctggcagcatggctgtgttccgggtttcactttcagagcagtacctgcccttctcagccttgcttggtgttcttggaacacccctagaccagccccagaaggtgagtctgacgtccgccatgtctgctaggacccctgtccttggtcattcaagtcattcaataaagattcatgaagccaagccctgcttatgtcagtggaccagacagacacaatccctgctccccaggcggggaaagttagcaatgagcaaataaacgatgccacactgtggtacgtccctgatgaacagggcgatgtggcagagagtggtaacatcagctggggtggtcaggaaaagcctctctgaggaggttcatctgagccaacacctgaagatgagcaggagctgcggttttaaaatgtgtgtgtgttaatagcttcattgaggtataatagacacacagtaatcttgaccaacttaaagtataccattttgtaagtgttggcatgtatatacatccttctccacaaccaagatgaccactatatctgtcaccccagaagttttctcagagggacaacactttgcagagctgggggaacaagttttcaggcggagggaccagcgagcacaaaggccctggggcagggacaagcttggtggcatcaggagagaaaggagtccactagggagtgtgacggggtggccggtgccccacctggggccttctcagccaaggtgctgagctcaggtctgaatctaagtgcttccacaacaccctctcgccacactgggccatcagaatgccagggcctgccctccaccaaggctcttctgagaaaccagcccctgcgacatctgccagggacttagcaaggggtttctccaggaatgatttacattttaactgggaccttcaattccttgacccaagggagtgactagtgatggagcttcaagacctggatggacccttgatcagtttcttcctcagggctctatgttctcagccttcatgggatcgggtgtgctggtttcttgaaaattctgagttgcaagtcattatttgaagacaggggtgcctgtggccccttccaatcctccagcgctggtcctgggctcggaggctcttcctgcctgattgtcagagactcggcccatgtggaggagacagggagggtgggtaacgggaaacacaaggccaatccccttagagcaaactcccttacaacagatggctctgggggagcacagagcaggtcccaggcaccaagaaatgtgggctatcctttggccatcaggacgacgggatttggggatgcaagttttagcaactgcgaccaccagggcagaggctcactctagactcacaaacctgggtttgaatctggaacttactggatggcttaggccaatttcttctctgagcatccgttttcccatggattttttttttttttgacagggtctggctctatcacccagcctggagtacagtggtgcaatcgtgtctcactgcagtcttgacctctagggctcaagcagtcctcctttctcagcctaccaagtagctggaattacagtaagtaccaccacacttggctaatttttgcatttttagtagagatggggttttgctatcttgctcaggcgggtctcaaactcctgggctcaagcaatctgcccctcttggcttcccgaagtgctgagattacagatgtgagtcaccgcactcggcttttcttggacttttactctcagacctccctgcacggacgcacccatgggtgcgctctcctcgcctgcacctccgatgaagctgctgccaccatcggttggttccatttccttcttgcactcagtgtctctggttccatgattaatattggactaggcttggtttcctgagagtctaaatgactcacctccaactcacctccatttacaacggccctgctgagcaagaaggtctggggaagacggggactcctcgatagggactctcagcccacggagtcatccccaccaggctgtgggccttggccaagtctctttccctctctggtctcagcttccttcttcgtgtctctgggggatggaaggagatattggaaatcggaaagcccagctgctaggcccaggagttcatgagggttcacagccatgaggccaaggttaggtgaaaggtgcctgagctgggaggctggctgccactaagggaagggcttgggggatgggggccccctccagaggctccaactgagagagcatggccttcccatggtgctagtcacatcaacctgtttaatcctcaccagccctttgcagtagatcttatcattttcccattatagatgaagaaatggaggctcagagagggtgagcaacttgcccgatttacacagctagtaaatggcagagatagcatttgaccagggctgtctggttctaggacctctggcagccagaggaacagagctgtaaatgctctgcaggagccgccaggcccagaggaatccaggcctcccctcttccccaccggggccttgcaacaaaaggacttctaagcagatcattgaccctagcccccccattttacagatgagggcactgaggacccccaagagaaagtcatgcagctaaatgccaacctgggccacactggggctcctgactttccatctagtctttccacacctatcaagctggagccaagactgagcccaaatctggtgccagaggttgggggaagtgttcccacagagactgtgtgaccagcaggctgggccatggaggtgtaggaagtggtcacccacctgacatcacctgaggggccaggaaaggcctcagacccccaaggttccctcctgtgggcctgccctgcatgagtcaccccttggctggaacagtggatgtcatggtagcatgtttctcagaaaggggaacccccagccatgagcattttagctgtgctctggaatgggaggtctggggccatagcaggggcctggataggcagtgggagggggcaaagggaagtagagccctttccatgtctttcttgcatttccaagagctttctatgtccatattttattcaaggcccattacaaccttcagagggcagcccagtcatgcttcaacacacatctggcagaaggggaaactgatgctcccagtgttccccagcccctggtattcatgcccttgtgcagtccgctcccacactggggagagccagcctgtataaccaacagaatactgtggaaatgacaaaatgtgacttctgaagctagttcataaaaagcattgtgacttctgtcttgctcacttggggtcacttgctctggaggaagccagcgccatgttgtggggacactcaagcagccccatgggactgaagcctcctacccacagccgtgggagtggctaatcctggaagcagatgctccagccccactcaagccttcagatgactgccgccctggcccacatcttgatggcaatccctgagccagcatcaccctgtcaagtctctcccaaattgctgactcacagaaacagcgcaatataatgtttattgttttcagccactaggttctgaggcacatagcaatagataataatacattcagagaggagaaatgacttcccaaagtcacatggccagaccaggacttatacatcagtgctctttctcctggggaaagcaagggtgagagaggcctggggagggaaaagaaggcagctgaggcttcagagtcagacagggttggagtaaatcctagccctgccaccctcatgctgtgtgacctcaggcaagtgacttaactactctgagcctcagttcatttataaagtggggatagcaatactgacttgaaatcttgatgccaggattaaatgtctgaccaagggcctggtacacagcaggagctcaatgaatgacactgttaatgttactatgcagaatctttaagagcatccccgagggcctcacagccttccctcctgcccatgggaaggggcacaacaaacctagttctggagagccagtgcccctttgcttagtttccaaccaggcttggtctaggggtgtcatgcttgtgggtgtgcattgctggggttcacccaggcagctgagaacccctaatgttggtgcctcaaaagggcagggagatctggggatgtgagttggagggagcctgacatgggtcctgccgattaggactggtggaggccaagggtgacccagagaagcctaatggagagtcctactgctaccaaggctcccaagaaagttgctcagaaaaggtgcacctgcggctgggcgcggtggctcttgcctgtaatcccagcactttgggagaccaaggcatgcagatcacttgaggtcaggagttcaagaccagtctggccaacatggtgaaaccctgtctctactaaaaatacaaaaatcagctgagtgcagtgatgctcgcctgtaatcccagctactcgggaggctaagcatgagaatcgcttgaacctggggagggggaggttgtagtgagccgagattgcaccactgctctccagcctgggcaacagagtgagactccatctcaaaaaaaaaaaaaaagaaagaaagaaaaggtgcacctggacctattgaagaagaaaggccccagcctcccctctctgatttccagcctcctacctgccagctgctgcctgggccagaaagaaccctttatctgctaagggtattttggggccatttgggactcgggttcccagctgttggaggaagtccctgaatttcctgaaccaagttgggaccttgtgtcttgctcagcatcactttggggacacagattcccaattccccttggatggcttcctactgcattcaccttcctcacctttcctccaagaagcccaccgagctgagactgtgtgagcaagcgctcctcgctccccagtctcctgtagcccctcgggcttggcttccttccacagcttgctctggagggccccacgaccccacaacaaggactgctgctgtgccttgcacagagcctagggacttccccttctactcttcacagcactttcataccacctgaaacctgccgagggcacccgggggctctatccactgcctgcttttaagagtcccatgaatggctgttttccttggttgctaccagcccatctccccctgggatccagctggctccctggccacaaaatgtgccttccctccacttaagccatgtgtcagctactttcctgggcgccctgggggaattctggttctcaggagtacacagtttcctggggcagagggatgcatgaaccagtcattatggttatgacatgatgagatcagatctagaattgcggcacaaaaaatgacagaaaccactttttgactgggaagagggctgggggacaggagacactgccaggaaagcaacaaggaggaggtggcattggaacaggttaggaagatgatcaggagtctgtgtgcgtcccaggtggaggccagcgtgggcaaaggctggcaggggtgagaaggctgcacatttggctggagtataggtccaggagaagtaaaaaggcacaagggaggagtcagcccctgccaggctgtgagcagacttgtgcacccttgcatttgggtgactctgacccaggggagccactgcaggggttcctttcctgcagaatgggcataaaagtaggaccttgttcatggggttttcatgaggatacaagaaaccaatgcctgaaaactcttagcacaaaataagcactcaaaggtagctgttattgttatcattaaatgaataatataattttctacgtggtcctctgccaaaacacacaccatacttccgcaagggttctctacaggggagtgtcttggtgagatgtgtgtgctagaaaggtctctttggaaatccatggagggaaggatatgagggagagacaagtttccacaacatctatagatttatcctttttaatggatgtgcaatattccattaaatggatgtaccacaatttccgtaatcatttcttgttgtgaatctcagagtatttcaaaaatttataaataatatataaggaaatgttactgtatagttttcttttttctttttctagttttccagttaaattatttccttagtttttcttcactgaggtgaaattactgagccactcacaagtagtacacatttttttttttttttggcttttgctaaaaattgccatactgctttctgaaaagggttgtaacatttaccagcagagtatgaatgagtattctggtctcaccacaactttggggttggatttaccaaaattgtttttataaagcaaaaaaaaaaaaatgatgattgtatagatctaaaaggttatcaaaggttgcttgaatttgcatttctttaattactaaaaaggttaaacttataaaacttgtaattgatttttatttgtatttctccttgtgcaagctattttgatgctgttgttcatttatttattcaaaacaccagcccttctctctctctcttttttaattaaacaaaaaatagagatgaggtcttgctacgttacccgggctggtctcaaactgggctcaagtgatcctccaacctcggcctcccaaagtgttgggattacagatatgagccatgtcacccagctgccagcttttctacttttgtagtagaaagctctggactgggaagcaggtgtcttgcgttcctcctgtccctgtctggttctgtcattatcacaggcaggtcacttccataattgcttacctcattgtttaacatagtcccagctcaaacagcctaagatactgggcctggtacatccagaggagagtctggaagtgggtctcttgggaaggggcatgatggagcagttttcccaagtggagtccagcagccccaggagggttgagcatggagtggtcagttgtggagaccttgctgggaagttcctggtgggaggttatcactcctaccctatagggccttcacctgatggaggcctggtacctcgcaggacagatcaaggtagacacagaagccagagtatccttaggctattctgggctcagggaaaataactggcccacccttaattagagcacctaggactgcctgcctatttctgagccttggctttcacatctgaaaaccaaacaaaatcagtcaaaagaacccttgacctgtggcccacccagcagatgctcaacacagacacacggaatgtggaataaaaggagcaaagagaaaacccaggggatggggaagcactggaagggaaaatcattcaccagcaaatgagaacatagtacgaggaggcttgaatcatttctgttaggagagagtgccagccgcctcctccaggaagaaaactctaaagggtcaggcctcagggaaataaaatgatctataccatccatcagttcctccaacattcagtccatccatctaccaatccacccacccatttacccactcacctgctgctcatccatccatccatccatccacctatgcatccatccatccatccatctatgcatccatccatccacccatccacccacccatttacccactcacctgctgctcacccatccatccatccatccatccatccatccatccatccatccacttatgcatccatccatccacttatgcatccatccatccatccatccatccatccatccatccatccacctatgcatccatccatccatccatccatccatccatccatccatccatccatccatttatgcatccatccatccatccatccatccatccatccatctatgcatccatccatccatccatccatccatccatccatccatccatccatccacttatgcatccatccatccatccatccatccatccatccacctatgcatccatccatccatccatctatgcatccatccatccacccatccacccacccatttacccactcacctgctgctcacccatccatccatccatccatccatccacttatgcatccatccatccatccatccatccatccacttatgcatccatccatccatccatccatccatccatccatccatccatccacctatgcatccatccatccatccatccatccatccatccatccatccatccacttatgcatccatccatccatccatccatccatccatccatccatccatccacctatgcatccatccatccatccatccatccaccaatttatcatccactcactgattcattttacagcaaatgcttatgaatggggatgggtgggtgatggttgctttttctgcagtctccctaggccagttgtcccttccaaagaatctcaagggcatgggagaaggtcctggctgatcgtgtcagggacaggaaactactcacatttcaccgtttcttggggcaggagtggaggtgggggcattggaacccccttggggcctcctaatatcctgtgagtccccacctccagggccagaagctgcctgcctccgctccccgcagcccaggtgcggcgggcagcacactccctagagccaggaccactagttccgtcaaatccggggcgggccattcaaacagctaagggaggcgtctcctagtgtgccttttcctgagtcatctctgcacgtgtttgcccccttttttcttcgctgcttgtagctaagtgttcctggaaccaatttgatacgggagaactaaggctgaaacctcggaggaacaaccacttttgaagtgacttcgcggcgtgcgttgggtgcggactaggtggccgcggcgggagtgtgctggagcctgaagtccacgcgcgcggctgagaaccgccgggaccgcacgtgggcgccgcgcgcttcccccgcttcccaggtgggcgccggccgccaggccacctcacgtccggccccggggatgcgcgtcctcctcgccgcgctgggactgctgttcctgggggcgctacgagccttcccacaggtaagcgggtgacgggcgcctggggaggtgccggcggtccagagcccggacagtgtggggtgcgtgggacgcaagggaggacactcctcaccccgttccctgcccagctggagtgagggggcgcgggtgacaagcaggaacaccggaatatgctagcacccacaggtgggaggctggctgaagggctagtggtggggggcgcctccttctcaccccgcgatggctgggactgattcattcattcagtgtgaattggactgagagcactgccatacgcgggaggcgctctttagcccgcctacctgcgggcccgtcggggtcctgggcagatcaggtgaggccgtgggagtagtgggcaggccagatggggcctcccttagccatgggaggttggtcgtccgcgctctaccctgttgtgtgcgcggtcccgtttgcccccttcctaagctggccactggctggagggtcaaggaaaggagggagagttggctgtgggtgagagtggggtgagggtgcaggaccaccgggattagcttccccgatccgcgtccggcaaagcaacgctgtggattgaattcgctggagcacgtggtgggcatttgcccctggaagaaggtcagtggtggggctgaagtctatggtgggttgcctcagaattgagtttggggactgctttaggaaaactgagcacttaccagtggccagcgccaaattaatcactgtggggagaatgcaaagtaaccaggcgtgtttcacggagcccaggggctgctggagagagaggccctcagctgacccaggaccccggtggacccctgcatagaaccatagtaggtgcgagtggatgcctgctgaatgatacagagggaaaggaaggagcaggctgttagtccagcggtgggtcacggtgggggagagggaagacccagttcccctttaatcctacaggaagagaggactccatgctatggatcaattctagtcatctgaaccttaggcagtgggaggagagtggcagagtgggctttaggcaggagggaggaactatgcagcaaaggaggaactatgccctcttccatttccaatgggcaatgtgaggtattccccctttccccccaagagggcagaggggacaaagccctggctagagacaccctgtcccagctctgcaagccctcacctgggggaaggtaagagtttggagtgccaaggtcttggggagatgaagggaaggaagagatgtgagaggtgcttggggggctttgctggtttggtttggcagctgaagctcatgtgcttcctttctgtagagtgaagccccctccactttttttaatgttagagacagggtctcactctgttgtccaggctggagtgcgatcataactcactacagcctgaactctcataccaaaccttttttttttttttttttttttgagactgagtctcactcttgttgcccatgctggagtgcaatgctcgatctcggctcactgcaacctctgcctcccggattcaagtgattctcctgcctcagcctcccaggtagctgggattacaggcatgtgccaccacacccggctaatttttgtatttttagtaaagatgaggtttcaccatgttggtcagtctggtctcgaactcctgacctcaagtgatccttccgtctcggcctcccaaagtgctagggttacaggcatgagccaccacacccagcctcccataccctttttaaaataaaaatactatatatttaattgcacaaggaatatataaatatattctcaaagcaaaactgtaaacgctacagataaagccaagtcttttgacaccgcctcatcctgatcccttcaaagatataaccaccataattgatttggtgtgtttcctttgcagacctttataaatgcatgtccatatttatattgttttaatagacatatatatagttttccatatactataccctacagtacatatggttcttcatttggctttataatgtctatgaggcatcttggtgagctttccatgctgaaacttacagatcctctgcctatcttttaaaatgctatgtgatcttttgccaaatgggatgtttcatagtttatttatgtcctggatggatgggtgctaaggttgccaccattgttctttctttctttctttgttctctactacagtgcacagccctatatggatgcttttggaaataaatgtctgtgattctttcctagacaagagactgagaagagaatactgaggttgcagggcgaaaatgcattcaaattaaaagacaccaccgaactgccttccagggtggctggacaatttaccctcccgctagcagtgcaagagagtagtaactttcccacatcctaaccgacatttgatcttatcagcattttaatttttctcaatgtgattagtgaaaagggttatatccttgttgccttaatttgcatttctcgcctaccggggaagctgagcatctctctgggctcaggcactaggtcatttcttggcaggagtcagggagtccttggggaagggactacctgcccaacacagtactcctttttgcccctcaagccttctcccacttctgttttttccagtaaaggttcgggaagctcgttattttaaaaaaaaaatcccaaattagggcttgaatttccttgagtttaaaatttttttttttttttttgagatgaagtctccctcagctgcccaggctggagtgcagtggcacgatcttggctcactgcaaccaccctctcccaggttcaagtgattctaccgtctcagcctccctagtagcttggattacaggcacttgccatcatgcctggctaatttttgtattttagtagagatggggtttcataatgttggccaggctggtcttgaactcctgacctcaggagatccatccacctcggcatcccaaagtgctgggattacaggcgtgagccaccgcccccggcctaaatttttttttattttttgggacagtctcactttgtctcccaggctggagtgcagtggcgcaatctcagctcactgcaacctctgcctcctgggttcaagtgattctcctgcctcagcctcctgaatagctgggattataggtgcctgccacctcacccagctaatttttgtatttttagtagagatggggtttcgtcatgttggtcaggctggtctcgagctcctggcctcaagtgatcctcccacctcggcatcccaaagtgctgggattacaggcgtgagccaccgtgcccatcctgaagttcttttttcatctctatttgatttttcccaagacgccatcatttttcgcctggtattctgaggcaggaatgctttcttgctagctggcaccatctgagagttggcctctgatgcttcgtatcactgtcttgtccaattgtgtttttttgtaatatgacccaggattaactggtgcatatctgcagagaaaaatttattcccccatagctccatccttttcatccaggcaccatgtggtggggttgcggggcgggggaagccccagctttcctgtgaactctgtagacttagaaattccccaacatcatgttccttgccagtgctaaggctaaacaagccttcctcccacatccatgtacccccaattccagccagatgtaagcatctttgctctgggttagtgtgcaggctgggaccaggaaggttctcatgaaagtatcttagctggggccgggcgctgtggctcacacctgtaatcccagcactttgggaggccaagacaggcagattacttgaggccaggagttcaagaccagcctggtcaacgtggtgagaccctgtctctactaaaaatacaaaaattagctgggcatggtggcaggcgcctgtaatcccagctactcaggaggctgaggcaggagaatcgcttgaaaccagaaggcggaggttgcagtgagccagcactcccgcctgggtggcagtgagactgtatttaaaaaaaaaaagaggaattttagctggggtgatagaaaagctctatgtgtgactcctccatctagcaatttaactttaaaagcttagctagttactccatacagtgtagtgctaatcgtggaatttcagggagtggcaagagggcaggagagattttctggttttgttttgcaaaagggacatttccagggctgctcaaatcctgcagggaggcaaggacggcgggggggcgggggggggacctggagaggaggggaccctgaaggagtggaaggagggtctggcttgtcttaaagccatcccttcccagggcggcactagtgctctggggtcagggagtcgtgttactcagcttgagagcagtgagtgccggaaggaggggcgtttactgtaagtttctgcttctgctcccactcatatctgacttagactcgtttcttgagcagattgtgattcattctaaggtttttatactccctcatcacccttcttcacatcaggacaatcatcagaaggaaaatggggctgaaggatgactgtgtctggcccgggggagtcctggaggcttgagggtccttggcaatgacagtagatcagcccagcctgggccagcttgtccagccggtgcactgaccctgggtgtggcccatctgggatcacagtcctcatttcacagacaaggattcagtgcagaggcccagaggtaggggagagtcttgcctacagttccaggactggtcggggtagagcccaccacagactagacacgcagaatgtcaaaaaaaggcagctctcggccataccagttctccacttctctctctcccctcccaggtccacccaggggatactggggtgggggtgggggaccttcttccggtatctatggttgaaaaccactgggcattctcgtggccttgctggtggggagggactttttatacatggctcagtctagttactccctgaatgcctaagtcttttggtgacatgcaagtattcatgcatgcatgcatccagcagatctgaaatgagcagctgttctgggtcaggcatggctccagggacttgcattcagcctctgcctgtatgccccccgtgacaggatgcttgctccttgctgaggcagctcacaccatcctgggttagctttggcatttagatgatcttcatgatatgctgaaatctagtttctttttctttctttttttttttttgagatggagtctctctctgtcacccaggctggagtgtagtggtgcgatctcggctcactgcaacctccgcctcccgggttcaagcaattctcctgcctcagcctcccaagtagctgggactacaggtgcatgccaccatgcctggctaattttttgtatttttagtagagatggggtttcaccatgctggccaggctagtctctaactcctgacctcgtgatccacccgcctcggcctttcaaagtgctgggattacaggcatgagccactgcacccggcctttttttttttttttttttttttttttgatggagtttcgctcttgttgcccaggctggagtgcaatggcgctgtctcagctcactgcaacctccatttcccaggttcaagtgattctcctgcctcagcctcccaagtagctgggattacaggtgtgtgccaccacgcctggctaatttttgtatttttattagagacgggatttcaccatgttagccgggctggtctcaaactcctgacctcagacgagcccccccgcctcagcctcccaaagtgctgggaatacaggggtgagccaccacgcctggcctgaaatctagttttgaaaatgagtcacctccctgttcttcagaagcgcctctggcaatgtgaagactgtgactttgggtccccggagtctctcagccagtcacacacctgtcctccaacatttattcctcacgtagcgtgagctcaaggctcctcatctgcctgttctcttcaattcattcattccacaaacacttattgagcaccttctgcatgccaggaagcactccgggtgctgcgagttcatccatgcaccgcatagcagggtctctgccccacggaactgacattccacaggggtgacagtcaacagactgctgctagttgcaatgagaggattagaatcctgtagtgtgagagagacgggcggctccctaagatggggaaaacaggacttgcagacggtaacatacacacggaatgaaaagagggaggcagccagtgggagattagcagaaaagcatccaggcccagggggtaaaagccccaagaggctagaggaacaggaaggaggccggggtggctggagggaagtgagtggagaggggtggttaggagaaggtggcaggaaaggtggtagatcgtgcagacctttgtggactgtggtgaggtttttggcaggggagcaatactgcatgatagatttaaagttccttctgtctgctgtggggggctgggggattggggggagcaggcaggatgggagcaggaagccaggtcattgcattgatccaggggaggggtgagcagaggtgggaatgtgctttttcttcttttcttttctttttttgagacggagtcttgctctgttgcccaggctggagtgcagtggtgtgatctcggctcactgcaagcttcgcctcccaggttcaagccattctctcgccttagcctcccgagtagctgggactacaggcgcccgccaccacgcctggctaattttgtttttgtatttttagtagagacagggtttcaccgtgtcagccaggatggtctgatctcctgacctcgtgatctgcccgcctatgtagagacagggtctcactatgttgcccagtttggtctcaaactcccagggctcaggtgatcctcctgcctgcgcctcctattgctgggattacaggcatgagccactgtgcccagctggaatgtgctttcaagctagaatcaacaggacctgtggatgggtctggtgggagcgcagagggcaggagggaaatcagggatcctgtccgtatttgggagctcagaatctggctgcatggaggtgtcattttgggatgtgggaaaaaacaagcaaaggatagaacaggggttttggagaaaagttctattttgcccatgctcaagtaccagtgggggttgggtgttgaaatgtggagctctctacagagttcaagctgctgatatgaatctctgggtaccagagtcaactgtagaagtcctggtgccacctgggccaaagaccactccccagtagactcaccttacttctattaaccaagcccaagaccccctttttttggcccccacattatctgttcattcgttccaacccaagcctaggctcttttattcagcctggttacagtatatgctagttttcttttgctgctatagcaaattagcacacatttggtggcttagaacaacatgaaggtattgtcttatagccctggtggtcaaaagtctatgacaagtctgtaatcccagcactttggaaggctgaggtgggcagatagttggggccaggagtttgagaccagcctggccaacatggcgaaaccctgtctctgctaaaaatacaaaaattagccaggtgtggcggtgtgtgcctgtagtcccagctactcgcgaggttgaagcacgagaattgcttgaacctgggaggcagaggttgcatcaagctgagatcgcagcactgcactccagcctgggtgacagagcaagattctgtctcaaaaaaagaaaaaagtctatgataaggcagcagagctatttttcttctggatatgctgtagcaaaatgtttccttgcttttttccagtttctagaagctgcctgtgttccttggtccctggccctgcatcactctgaactctccttccatcctcacatttcctctctctcttttttttttgagctcgatctctcggctcactgcaacctccacctcctgggttcaagtgattctcctgcctcagcctcccaagtagctgggaccacaagcacccgccaccacgcccggctaatttttgtatttttagtacagacaggtttcaccatgttggccaggctggcctcgaactcctggcctcaagtgatccacctgccttggcctcccaaagtgctgggattacaagcacgtgccaccatgccagctaatttttgtatttttagtagagatggggtttcaccatgttggccaggatggtttcgaactcctgacctcaagtgatccacccattttggcctcccagagtgctgggactataggcatgagccacctttgagagacagtagagcatttcgttaaaggtatgaacttttttgtcagcctgtcaaggttatcccttgcttctgacactagatggtgacttgagcaagttaagttacctctgtgtgcctcggtttccccatctataaaatgggctaataacagtagctaccttgtattgtagggctggtgtaaggatgacatgagttaatatgtgtcaagtgctgagagcagcttctggacacagtgagtgctgtgcaaataaaggtgagccttattaggtgcctgttgtatgtggggcattatggatacagccatggagatgaaccagttccagtccttgccctcgatggggggcagtgtgggaaggggaatacagaagagagggtggccagtactgcgtaggggactgtctggggcctgcgggagtccagaggagcccatctttacttctgcctgggtcagtaggggaaggagcctccagagtttgcagtgatgaggctctgcaccacagatggtgccattgtccttgccagctttgcccagggctctggaggcagcagaaggggtcagaggttaaacagcacatcagtgctggtggttggggcgagcctggggcctgctttggaagccccacccagcaggttccccttgggttcttgggtcctccagggggctaagaactcctagaggcgtcgcccacagcttcatttcagccatcaactttcttgacggattgctgcctgccaggtacggttcctgctctcagagagtgcgtgcacagataatgtggcctccacacagtttactgaaatggttccaacctgctgagaccaggaaactcctaaaccccaccttcaccttcccagcctgggcaggcacccttcccactcttgattcgggtgagggaggccaggacgcagcggccaggccaagagtttcctctctctccaaacggtctggggggcatgtgccctgccccttccccacacatagtctgggagagggaggtgggcaaggaaacacaccaggctgggcgccaaggctcacgcctgtattcccagcattctgggaggccaaggcaggaggatctcatgagcccaggagtttgagaacagcctgggcaacaaaaaattagccgggcatggtggtacacacctgtggtcccagctactcaggaggctgaggtgagaggatcacgtgagcccaggaggtcaaggctgtagtgagccgtgttcatgatcgcaggactgcactccagccagggtgaccgcaaggccctgtcttaaaaacaaacaaacagacaaacaaaaagtaaatacacaagccccttctgagcaactggcctgaggctggcgcaggaacctaaggcacctccaagaggatcagaaagtcgaatactcccagggagctgggccccgcttccttttccttcaggtccactatatccatctctctctctcttttcttccttccttccttcctttcttcttccttcttcttttcttcttccttccttccctccctccctccttctcttctttctttctccctttccgttcctttccctttcgttttccctttccctttccttttccctttccctttttctttttcttttttttttttcattttcttgacagagtctcactctgtcgcccaggctggagtgcagtggtgagatcgtggctcaatgcaacctctgcctcccgggttcaaacgattctcctgcctcaggatcccgagtagctgggattacaggcgcccaccaccacgcctggctaatttttatgtatttttactagagatggggtttcaccatgttggccaagctggtctcaaacgcctgacctcaaataatctgcctgcctcggcctcccaaagtgctgggacttcaggtgggagccaccgcacccagcccactgcatttttctttgtagctgccattgtcccgtggcggctgttgctgcccgggaacgtacttcagggctgggtgggttttaccttgtctgagttgtagctaaggatgcagctccaacacttgcttcggccctggaatcttcaggatccctgcagtctcaacaattggctcatggagccggcacgggattgctgggaggcaggagggatttcttggtgggaagtgaggatcgaccagttgctaaattcggactcaaggcgtgatcttgctaaaacggactcgctctcctccatcctgtccacctccccaccacattaatgaccctgaaaccctttaatgcttccctagtgccaaaggcaacatgtcccaaagtcaccttctttctttctttttttttttttgagacagaatctcactctgtcacccaggctggagtgcactgatgtgatcttggctcactgcaacctccgcctcccggcttcaagagattctgctacctcagcctcctgagtagctgggattacaggcgtgcaccactacgctaggctaatttttgtagttttagtagagagggggtttcgctgtattggccaggctgttttcaaactcctgacctcaagtgatccgcccgcctcggcctcccaaagtgctgggattacaggcatgagccaccaggcccggcctcaaactcactttctggcaatggcagttctgagaaaaaaggttctatggccaacgaagtgggagaaacattgcagagttttctgactagctcccatacccttccttggagaatcaaatagtaagtaaccacatcaaggttctgagaagccccgtgatctaaaatggaaacctctcgaatggactccagtgattatttgtgtttgtttgtttgtttatttatttatgagacagggtctcactctgttgcccaggctggagtgcagtgttgcaatcatagctcactgtaacctggaattgggggctcaaacaatcctcccaccttagttccttgagtagctgggactacaggcacatgccaccatgcccagctaattaaaaaaaaattttgttaggccgggcacagtggctcatgcctgtaatcccagcactttgggaggccgaggcaggtggatcacttgaggttacgagtttgagacatggtgcaacccaatctctactaaaaatacaaagcttagccaggtgtggtggcacatgcctgtaatcccagctactcgggaggctgaggcaggagaatcgcttgaacctgggaggcagaggttatagtgagccgagattgcaccactacactccagcctgggcgacagagtgagactctgccaaaaaaaaaatttttttttttttttaaagagacagggtcttgctatgttgcccaggctggtcttgaactcctgggcttaagcaatcctcccaccttggcttcccaaagagctgggattacgggtgtgaaccgctgcgcctgtccgtgttctgcctatcatctgttaccatccggtagccccagcatttgatgaaacgctgtttgggaaatgacagtgaagagcttccatactcatctctttttctgactccctgactctctcttctgcctccctcttgcatttttaagttcccttaaattgcactgggctcccctggataatccagaagaatctcccatctgaaagtcagcgggttcacaacctcgatgccatctaccaccctgattcccctttgccatgtaaggagacgtatatgagcacatatgtgaatatatcaccctaggtcctggggacccagtgaggatggtatgattcttgctaactgacagagcaggagcgtcaccatcttggacaagcatcgccgttttaaattctccttgattaaaaaccgcctaaatccagccccaaaacatcagcctaacggctaacgtcagcatgaccataaaccacaaatgacacctccaaccagaaacattccaacacccccatccgactggagacatgccagccctgagataacctcccctctgaccagagacattcccagcatacagtaaaactctcctccacacagaaacattcctagcctgcgaaaagctcccatcccagaacccttaaatacccttagtccataaaaacaatgctgctgaacgaaattggccagaaggccttcttggttttattcttttttttttctttttcttttttttttttttgagatggggtttcactcatcttgcccaggctggagtgcagtggcgtgatctcggctcaccacaacctctgcctcccgggttcaagcgattcttctgcctcagcctcccgagtagctggaattacaggcataagccaccatgcccggctaattttgtatttttagtagagatggggttttaccatgttggtcaggctggtctcaaactcccgacctcaggtgatccacttgccttggcctcccaaagtgctgggattacaagcgtgagctaccgtgcccggcctcagttttattctccaaaataaacctgtctttggtaagccgcttttcatatttttttcttctttcttcaactcttacacaaaaatcatttcaaggtgcttgcctgtccctgagttccttccagccagggactccaggctccaccctctatgctgtttccgtgtccactgtctttgggttttatctccaaccctggggccaggcagcatggggccctgcacactctttctcagctgtgcaggaactggggaaaactcaactcggcacctgcttgcagtgggacaactgtgagaggtgctgcctgtggccagggatggagcctgtggccagggatgggtgtgtttaaagaggtggaggaggaggactttagtttcaggtagtctcttggtctggagctcaagtgagcactgagtgtggagagaggggttcagagtcctacagttaggaggtgactactgagttcggcgtgtggtggtatagtctagtggttgcttaggagcgagggtgtggcggtagacgcatagtcccctaaaacgtccatacattctacattgttaatttgggacagggtctcaccctgtcacccaggctggagtgcagtggcccaaccacggctgaagagattctcccatctcagcctcccgagtcgctgggactacaggtgcattccaccacaaccagctaatttttgtatcttttgtagagacgggtttttctcctttgccgtgttgcccgggctggtctcaaactcctgagctcaagtgatcctcctgcctcagcctcccaaagagctgggattataagtgcgagccacttcgcctggccaaatgtccacacattctaatccttgaaacctgatactatggatcttgagacaggaagatgatcctggattatcagggcgggcccaatctaatcacaggagtccttaaaagcagagaacccttcctggctgtgttagagagagatgatagaggcaaagagagagatgtgatgtgagaaggactcagcccaccattgccggctttgcagatggagtaagggggccatgagccaaaggatgccacagtccctagaagcagggaacagcccttagttggctgtcagcaaagaaacaagacctcagtcctacaaccacaaggaactgaattctgccaacaaccttagtgagcagggaaaccaacagtcccttaaagcttccgctaggcacacagcacatgacctggatgggggtgatcagagagggcttcccagaggaagtggcactcatgagtgaggtctcaaggatgaatgggggtacactggatttagggaccagtgcaggcagggaaacagcacgcacaggctgctgcagggagtggggtgcccgtggggtgccagtggcaaaaagaggctggtaggagagagtaccaggggcttcacaggcaggcaaggagggcagggcttcttgggccactgttaagactttggttttttttttttttaaatatggaccgtttcatgaatttccgtatcatccttatgcaggggccatgctaatttctgtattgctccaattttagtatatgtgctatcgaagcgaacacaagactttgggctttattcatagctgggttggaagccatctgagggtcttcaataggatggaggggaagacagtagatcgtgttttcaaaagatcagtctggtgtctgcactgtgagctgggcgtggtggatggggtagacgagaggagaccctcgggtggtcactgtcaagtccagatggcgggaaggtgaggaagagctggtagatgtgggggtaaaactgcaggttaaacagacagaactagtgataggttgggggccagggagaagcaagcatttcaaaaagcagtcagtctcggccaggcatggtggctcatgcctgtaatcccagcactttgggaggctgaggtgggtggctcatttgaggtcaggagttcgagaccagcctggtcaacatggtgaaaccctgcctctactaaaaatataaaaattagccaggtgtggtgccaagcgcctgcagtcccagctacttgggaggctgaggcaggagaattgcttgaacgcgagaggtagaggttgcagtgagccgagatcgcaccactgcactccagcttgggcgacggagcgagtactctgtcttaaaaaacaaaaacaaaaaaaccctcagtctcatggggagtggggagcagggatctcagagccctgaactacagcacccccccaccccaggcagcagaagctggcggatcagagcacgtgccaaatcctggccctaacactgaccagctgtgtgactttgggcagatttctcgtccttacgtctcagtctcccccatctgtaaaatgggctgacagttgttggctattagaattactttcgctatggaaagcaaaccgttccagcatttgcacttctttctgctcagcttctgctaggtcagcgcatctcaaactccctggggctcttgttaaaatgcagattccaattagggaggtctggggttctgcattttgagaaagttccaaggtggtgcccctgctgctggcccggggcctcaccttgaataacagagcgcacagcggtggagatccccaggagacagggaggggaggggtgcttacctcgctggccctgctcagctctggccccttcggggattttgcatttgatctaactccccgctcaccccacaacttctagactcgtctcccacaggtatggtccggctgagaccaggtggggctttttgaaagtgaactttaactggtcttgtagggaaaaccaaaccaacctgaaaatagacagacctgaaaatggtaaggttttaggccaccctctctttatcttgatgccactaaggtggggcggagggcctccggttgcacagctcattaccttgtggacacctcactttgccttgaacctgcggggaactccacccaaaagccccccctccagtccttgggcttccccctcccactcttcgctttctgatccctccttccctcccaggcaagggcccgagcacatcccagctcccctctctctcttccccagggcagcaggagctgatgagccaggcagggtgggcctggaaattcacagggccagacttctccgggcagcggcagacgccccggcccttgcctccttctccaccgggagctgggacaggtgaagggcctgtgtaaggggaagggggtgccccttcctcgctcagctccacatggaaaatggggccctaagtcctctgctcctccttccaaggggatttgagaggcacaggctggccatcccaccaggttgagatcccacagcccctccgcacagcaagaagactgccctccggtggcaagctatggatttaccgagaattattgctgaaaagaagccaccacctcccagcatttcgtgtccttgagatgctatttacatatgtggctttgtacatctgtgttctcactctctttacatatacttatcactactttatttttatcactactttattttttaattctctatttttttttttttttttgaggcagggtctcactctgttgctcatgctggagtgcaatggcgtgatctcggctcactgcaacctccgcctcctgggttcaagggattctcccgcctcagcctcctgagtagttgggattacaggcatgcaccaccatgcccggcttatttttgtatttttagcagagacggggttttgctacgttggccaggctggtcttgaactcctgacctcaggtgatctgctggcctcagcctcccagagtgctgagattacaggcatgagccaccgtgcccagccaagatgatcccagttttgttggcaacatccaaagcattgtaatcaggagccagtggaacatatgccttcttctctccatccggccgaatcagggtgctgaccttggccacatccatgccatagagctttgtcacagcctgtttgctctggtacttgttggctttaacatccacagtgaatacaagtgtgttgttgtcttctatcttcttcatggcagactctgtggtcagtgggaacttgatagcagagtggtcgagcttgtttctcctgggaacgctctttcgaggatatttgggcttttaatacctatttttatttatttttttgagatggagtttcacccttgttgcctaggctggagtgcaatggtgcgttcttggctcactgcagcctccacctcccagattcaagcgattctcatgcctcagcctcctgagtagctgggattacaggcacccaccaccactcctggctaattttttcgtatttttagtagagacggggtttcgccatgttggccaggctggtctcaaactcctggcctcagctgaccctcctgtctcattctcccaaagtgctgggactacaggcgtgagccaccgtgcccggccctgggatttttttattttaaagatgggtagcctgtggcccagagatgggggagaattggggacacggtgaagctcaaacctctctgcacttagttgctgtgtgaccttgggcaagtggctacacctctctgggctgcagtttcctcatctgtaacatggggtagtgatctggccccaaagagctagcagtgtgtaaaggaggagttgtgtgaaagcaggcacccaaggccagactcgggggagtaatgtgcaataccatgggctccccattctctgcaccccctacccctccattgacccaggtgtgatggcaggagggaagcataagcagccagagccccccaggtgtgccccaggccccagcagagtgagcagggcctgggcccatggtccccatagactccgtagctgtcagtgagattagcaggcaggccgggaggggagaccaaggacaaggacccagaatgttcccacactcagcaggccttgccagtgagccctcacacctccagccagccccaggcccaggctactgaactcacccagtgagatgctgtgggttaggagcacttcgggtgtcctggcaggttcctgcccccctggagaggctcccaggagccctctgggtgacttaagagaggacactctcctctcctactggagggaggagggtgtcctcaaggcccggggctctggattaaataagaagggagacaactcaagcgccatgtgactattgggcaaatatcacgttcatgtattatttcaaattaatatggtgacatgtttcagacatgcaaaaaaaaaaaagaatgatgtaaccaacaccccatttatccaccttccagccacgctgctgctttctgctgcttcctgaacatgccggaagcttcactgctccctcgagtggagagaagagtcaggcagccctttaggccagccaggcctctctcctggggaaaagtggcttctgcttccttccctaaaccaagaaagccccacatcgcaccaggggccacctcctttctgccaggcaccatcttggatgctgaagacatggaaatgctacaaggcttcctccctgcctcttgcctcacttcctgcttcccttctcttgcctcacttcctgcttcccttctcttgcctcacttcctgcttcccttctcttgcctcccttcctgcttcccttcttttcccttttgctccaccctagaagtttcacatcctggatcaccccagaaaagtgcaatggcgttcccctgtcattccatctggaaagacaaaactccttccctggaatctcaacaaagaatttcctctcttgaatcctttcttatgatggtgcttcactttcaaagaacccttgaaacacatggggggcttggtaaaaacatatcttcctgaggccgggccaggtggctcacgcctgtaatcccagcattgtgggaggctgaggcaggaggattacttgacctcaggagtttgagatcaacttgggcaacatagcaagacccagtctctacaaaaaaataaaacattagatgggtgtgggggtgcatgcctgtggccccagctacttgggaggctgaggcgaaagagaggactatttcagcctgggaggctgaggctgcagtgagccatgattgcaccattgcactctagcctgggcaacagagtgagaccctgtctcaaaaaaaaaaaaaacaaaaacaaaacaaaaaaaacccccacaaaaacccacaaaacaaaaaccacgccttcctgaaaagagtgagcctctccgacccctacttcacaccatgtacaagaatgaaacttgaatatgaacgattaaacaatctcatctaggagttaatgtaggagaatatctaagtgacactgagtgggcaaatatttcttaaacaggacaaaaaaaggcattaaccataaaagaaaagattagtatatgtaatttattaaagctaagaatgtctgttcatcaaaagcctccaaaaagaaagtgaaaaggcaagccagaggatgcgagaagatacttgcagtacatataatcaacaaaagccgtgtatctagaatatgtaaagaaccctacacatcaataagaaaagccagacaacccaattaaaaaaaaatggccacaagacctgaataggcatcttacaaaaaagaatgcctaaatggttaataaatgtgggaaaaggtgcccaacaacattacttatcagagaaatgcaaataaaaaccacaatgaggtatcactacagatccaacaagatggctaaacttttaaaaactgataccaccaagtgctgacaaggatgtggagcaattggaatcctcagacactgcagggaagtgcctactagtacgactactttagaagcctggatggagaatctatcagaactgaacatgccttatgccccagcagttccactcctaggtatatagccaacaaaagcgtgtacgtttggacactaaaacgtgtgtacaggaatgttcccagcagcactatcataataaccaaaaagtggaatgtctatcgagagcaggcccggagtggtggctcatacctgtaatcccagcactttgggaggccaaggcgggtggatcatttgaggtcaggaattcaagaccagcctgaccaacatggtgaaactctctctgctaaaaatacaaaaactagctgggcatggtggcacacacctgtagtctcagttacttggcaggctgaggcacaagaatcatttaagcccaggaggtggaggctgcagtgagttgagattgcaccactgcactccaacctgggcaatagagcaagactctgtctcaacaaattaaaaaaaagagagtagactagacaaataaattgtgcatatttgtgtgatgctatactgcaaagcaatggacagaaatgagcaactgttatttgcaacagtgcgaatgattctcacaatataatgctgaattaaagaggccgattgcaggggaatggactgcgtaattctactttatgtaaaatccaaaagcagtcaacactaatagagcgatagaaatcagccttttgggaggagtgtgtgggaggggggatgacggaggagctggggctggcaaggtcccatttgatgagttgggtgctgattgcctggtgcgttcatcttgtaaaaatgcagttggctgtaacttgagatctgtgcacttttttgtacgggtgtgttagacttcaacaaatacgtttaccagaaatttgtattgttgggcccatcccagagacaaggtaggaagcaattatgttaatcccagggcaaggggatggtgactagccccaggtgaaggtggtgatgattatggtatgaaaagggccaggagaatttgctgataggttgtttgagaggagagagtcaagggagacgctaaagtttctggcctgagctggagtagcagggggaagcgtaagggcggtgtgggtttgtggaatcaggagttctcgtcctgatttctctcctatattacaaagctccgtctcaggcctcctgggactggtggggacagagggagtatggatatctgggatccacctggcctcaccagcttttctgacctgccaggatcgacccttcgaggacacctgtcatggaaaccccagccactactatgacaaggctgtcaggaggtgctgttaccgctgccccatgggtgagtgggggcgttgggggtggggagaaggggggaaatttgtcctcaattgatgaccctcttgggggattgatgagtggggaaattggagccaaccgtcatcgtcataattggctacagttttctgcaggtcattcctagtgtcgcggagtccaaggactctctcggaaggctagggctgtagaattgagactgtgtttcttgctgccaccagaatgtccatctccatgagtttttatttttaacgtagagctgccctttattggacacttactatccatgagtccgagacctttatatgcacggcatcatctcattaagtgcttgcaatgatcctttattacactcaatttgcagatgaggctactggggcttggcagggttaagttccagctacttcccttgatgaccagggtcacacagttgggaaatggtggaatgatcagggctggggcccagggctcagagacctcaaagcctgggctgtcaacatcctctgaccacccttcatttctggggcccagaagtcctttgcagttctttcttttctctcttatttttatttttattttttttgagatggagttttgctcttgttgcccaggctggagtgcaatggtgcaatctcggctcactgcaacctccacctcccgggttcaagcgattctcctgactcagcttcccaagtagctgggattaccggcatgcaccaccacacctggctaattttgtatttttagtagagacagggtttcgccatattggccaggctggtctcaaactcctgacctcaggtgatccacccgcctcagcctcccaaagtgctgggattacaggcatgaaccaacgtgcccggcctaatttttttatattaatttaaaatagagacaaagtctcgctatattgcacaggctggtcttgagctcctgggctcaattagtcctcctgcctcagcctcccaaagcactgggattacaggcatgagcctccatgcctggcctctttgccgttcttgactgccccagctcaggacaggtgtttatcctgggacaacctggacaatagatttctctgagaccagtctcccagaccagagctccctttctggaatgttcccccacccccagcaccgtgattgacttctagtcaattaccaggaaatccttctggagctggggtgagtgttgttccttccattttgtagatgatgcttaggcccgaggagataagcagctggaatagggtcatgaggcatttctgcccctgtggttattatcaaaagtcccaaggcaccaccagtggtcttagatgggcggggcaggacataacgatgccctcgtggtctctgacctccaggaacagagattgtcacggggacatcagcctttagctgtgccagcaagggtgggagggagtctgtgtgtgtctggttcatcatcgccacttcttgctttgaggacagcaggccattgcaagtgggcgggcatcgtctggagggcttccgacagtgggggcggaggggcccatccacccagctgtactgtctggagggtggtgacaggttatggccatcagggctattccactggagctgcgcgggaacccaggtcagtcagttcctagacttgtggcctcaactcccccatgagatgcagaccaggctcgtgctcaggccaccaaaggacagagggaaacattcttggaaagaatttgatgtttttgtatttgattttgatttgtatttccaacaatgattcaaagtattcattgtatgggcaaaagtagtgggttggatgctattggactttcttgcttttatttttggtttagtgttgattttgaatgatctattaggtgggtcccctggttttttcagtgcttcactggtcggccatccacccacccatccaagtacctgcccccctcacccacccacccatccaagtacctgcccacccacccatctttttaaccactcaccaacccacccctcccatcccctttccatttttcttcccatctagccactatccatccatccatctgtattagtttgctggggctgccataacaaaatactgtagtctgggtgacctaaacaatagacatttatttcttacagttctggaggcttgaaggtccaagatcaaggtttttggaggatttggtttctggtgagggctgtcttcttggcttgcagatggcagtcttctcatggtgggaagatcgatctctctctctctttctctctctttccccctcttcatatatgccaccaatccccctggattagggccccatccttatgacctcatttaaccttaattatctcctaaaagtcctatctccaaatacagtcacactggggttagggtttcaacacatttaacatatgaactttgtgggggacacaattcagtccatagcaccatcgccttcccatatccctccaattatcctcccattcaccgcccccatccatacacccacccctctcctggccattttctcatctacctttctatccatccatccatccatccatccatccatccatccatccatccatccatccatcatccatccaacaaatttttatttctctctctctctcttttttttttttttttttttgagatagagtctgtctctgtagtccaggctggagtacggtggtgtgatcttggctcactggaacctccgcctcctaggttcaagcaattctcttgcctcagcctcctgagtagctgggattacaggcatgtgccaccacacccagctagtttttgtatttttagtagagatggggtttcaccgtgttggccaggctggtcttcaactcctgacctccagtggtctgcccgccttggcctcataaagtgctgggattacaggcatgagccactgtgccaggcctagtttctgggcctttggacatgcctgtccccatgtgggatgccctcccctccgtccctacctgctgcaattctggaaccccttcctccatgaggccttcccttgctagcctgatggttggtggtggttcccactcagttctctcagggcccgcttgctgtggtttttatcctctggaatggagtggcccacagtgttctatgacttttcatgggacccacaatcccagccacaaggagaaagacacttccttctcatcctcttctggcccctttgactccagcctgaaagggccttgatggggagtgggtggagagaaaaatgacatctcaggtcccaggctccctccacttaaaagctgtgacttaggaagagggggctccctcctccccacttcccctctctaaggcccagtgctggctggggctgaatactccatattggtgtggtgggtggggcattttactggtgttttattgaccttgtgcttccgtgtagccagagaagaaaaaagaaaaacccacaaaaaccccttctttgatctctcggggaaatttcttgacattttgcctgccctgtgcagccagcactcagctgtgtggccgggtttgcttgtgggcgggttggtggaggaaggaagctgagggacctttgagattgaaaaatgtagatgtcatcgaatccctccttgcacccaggcctgtgatgccctctccagcattcctgagagcaggtccccagccctttgcttacatactcttggtgacggggagctcattcactgactcataacaatgaccacgattcataccgatggagcacgctatgtgctggccactgtgctgggccctttaccgaccttaagttccttcaatcctgataagaaatccagagaggaaacttggacaccgaggggttcaggaatttgcacaaggccacatgcgtatcagtggctcagccgggccgtgaacatgaccaccgagtgcagtctcctgagctcttcaactgtagttgatactgaccctcaaggcctcgaatttgggaggcagaagagtttacgagtgaagagctaatgcgggggctacaaagcccttcctgttctccatcttcctggactaccctctctttgtgtgcagactcgctccccacaggaaggggtctctcctgcagatgtttgaggcctgcccaggttcaggggaaggatgtgaggccaggccaagtgttaggtagggagcatggcaggtgtatcccatcttgtcccaggagctgagggttcctccgaaggctgtgaacaggaaggaggaggaggagggggtttgtgggttcccccagcttccgctgcccttgggtaaagctcagctttgtgcatgggcacgcccatttggcatgacagctgctgcccctgccgcctccccctcccccgcccagtccctcttcatcctgggcttcagctgagtgtgctgggctcccctgtgccctctgacactgtcccagcagagccccctcacagcacctcctggccccccactgtccctgtgtgcttgactcacacctctgcattcctcagggtccacttaagtgtaggccctccctgaccccagcctgggccacagagcgagattctatctcgaaaaaaaagagaaataaacatttgttggatggatggagggatggccctccctgaccccaagccagctcagaggtcttggctctgggctcttggtgcctcccatggttccactttcctaacactccttccatgtgtcatgacttgtctatcgtcttcctgcaggatccccagccctgaccccagggcttggcacatagtagagtctcaatttttgaaagaataggtgaatgaatgaatatggctaacttgccccgcatactcttctgtgacagccagccattgcctcacagggccaagcttccattgtccccctggcacctccctctgctgaagtcagaccagcctctctctcctgtccatcccactcgcaggtacatcctagtcttttctttaagcctgaaaaatccaccagggttcttttgtataggaggaagtatgtgggcgtggaagggaggaaatggaaggcagtagaaggaaataggactggcccaatgcagcaagcatttattgagctctgttggatatagggttatttgggggagagaaggacaaggtcctgcctcctgggagcaacccactagtaggggaggtgacatgcttatatatatctgatactccagagggtatctgtgctaagatagtttcaaaggaggaagaatgggagcttacagtgaggaaaagcccctataccactggtctgcatccacccatccatccatccgttcatctacacatccatctacccatccacccatctacccactcatccactcttccctaacccatccatctatccacctatctacctgcccatccacccttccccatccatccatccatccatccatctacccatccacccatctacccactcacctactgttccctaacccattcatctatctacccatctacccacccatccacctttccccatccatctatctacccatccatctacccatccatccatctacccactcatccactcttccctaacccatccatctatccacccatctatccacccatccacctttccccatccatctatctacccatccaaccatctacccactcatccactcttccctaacccatccatctatccacccatctatccacccatccacctttccccatccatctatctacccatccaaccatctacccactcatccactcttccctaacccatccatctatccacccatccacctttccccatccatccatccatccatccacccatccgtctacccatccacccatctactcactcatccactgttcctccacccatccatccatctacccatctacccacccatccacccttcccccatccatccatccatccacccacccactcatccatccacgtacccactcatccatccacccacccactcatccatccacccacccactcatccacctactcgtttatccattcacctatgcactcactcatccatccatccacccacccacccactcatccatttacccacccatccacccactcattcattcattgattcacccaatatgttttgtgtatttgcattctatcagaccctagagattcaaccatgggggggcagctatcatcttgccctcacaaactcaatctcaataagacaaatattataccaatttgagacttttctacctgcttgtaagaaaagggggtgccatagtttgaattcccccagaagtagactgttatgggctgagtcatgcccgtatcccccaaccaattcctatgttgaagtcttaaccccagaatctcagagtgtgaccttattcggagatggggtctttaaaaaggcaattgagttaaaataagttcactaggataggcccaaatccaatatgactggtgcctttataaaaggaaattaggacacagatatacacagagacaagactgtgggaggacatggggaacacagtccatctgtaagtcagagagaaagagctcagaagaaactagccctgcccataccttgattttggacttctggcttcaagagctgacaattaatttctgttgtttaagccaccctgctgtctgtcgtagtttgttatggcagcctgagcagactgatgcacagactttgaggcaatgatctgagtacagttggtgatgcctggaaacaccaatttggaagtagggaagtggcagacggaagggaaggcagcttataaagttgtgttagaaagctagttactgctgtgggcaactggggcttaatccctctgggggcctctgggagccagtgcagaacagctgagggtgagggagctggggtatttatatgccaatgtccatcaaacattggtggaactgctcctggggtggtacatcttggtaggtctggcctgccacaccctggcagagcaggctctgggtgctctgagagggtgattttaaagggacccagagagaggatctgggtggggtcagatgatcaggaaagttccatgagaagatggtatttcagcctgatctggctgggtgtgaagggttcccagtgggtggaagatggagaagccacttagcctgcaggaagaacatttgtgttagtttgctggggctgctgtaacaaagtacctcaggctgagtggcttaaaccagtggtccccaacctttttggcaccagggactggttttgtggaagatgattcttcccatgaaggggggtcagggatggttttgagatgaaactgttccatctcagatcatcaggcattagagtctcatgaggagcatgcaacctagatcccttgcacgtgcagttcacaatagggtttgcgctcctatgagaatctaatgcagttactgatctgataggaggtggggctcaggaggtaatgctcgctcaccgtcactcacctcctgctgtgtggccccgttcctaacaggccatggactggtactggtccccggctggggactggggtcgcctggcttgtggcagcataactccaatcttcacatggcattctccctgtgtgcacatctgtctctgtgtccaaatttccccttttcttatttattttatttcatctgtactgtattgtattgtttcagagacagggttttgctctgtcacccaggctggagtgcagtggcatgatcatagcccactgcaacctctaactcctgggctgaagtgatcctcccacctcagcctttctgagtagctaggagtacaatgtgacatcacacctggctaattttctattgttgtagatggggtcttgccttgttgcccaggctagtctcaaactcctggcctcaagtgatccttccatttcagcctcctaaagtgttgggattacaggcatgagttaccgtgcctgaaaatgtccaattttccccttttcttttatttttcttgtcttttttttttttttttgagacagagtctcactctgtaacccaggctggattgcagtggcgtgatctctgctcactgcaagctccgcctcccgggttcacgccattctcctgcctcagcctcccaagtagctgggactacaggcgcccgccaccacacccggctaatttttttgtatttttaggagagacagggtttcaccatgttagcgaggatggtctcgatctcctgacctcgtgatccgcctgcctcgacctcccaaagtgctgggattataggtgtgagccaccgcgcccgacctctttttattttttttgagacagagtttccctctgttgcccaggctggagtgcagtggtgtaatctcagctcactgcaacctccacctcccaggttcaagtgattttcctgccccagcctcccgagtagctgggattacaggcacatgccaccatgccctgctaatttttgtatttttagtagagacggggtttcgctatgttggccagggtggtcttgaactcctgacctcaggtgatctgcccgcctcggcctcccaaaatgctgggattgcaagcgtgagccaccgcaccggccaagtttccccttttcatgagaacaccagtcagattagattaggcccaccctagcggcttcattttaactggattgcctcttcagagcccctacctccaaataaagtcacatcctgaggtactgggggttaggactccagcatatatatttttttggggagacacaatttaatccataccaacattcaggatgtatgaggggtgttagagaaaagatcaagatacccagactggctgtagtagagagtgcatgaagtgagcaatgtactagaatgccagactgggaagatggagacacagtgtgaggcctgggagtgcaggctggggaatgccgtatgaactaggttgacagaacatgttttaatgaaatatgtgtgaggccctatgataggggaggcattggtgagtggacatagaaagactcatcctcaaggagctgacttttttttttccttgagacagggtcttgcttcgttgtccaggctggggtgcagtggcgctatgcccgctcactgcaacctctgcctcctgggttcaagtgattctcctgcctcagcctcccaggtagctgggattacaggtgtgcaccaccacgcctggctaatttttgcattttcagtagagatgaggtttcaccatgttggtcaggctggtctcaaactcctgacctcaaatgatccgcctgggctgggtgcggtggctcacgcctgtaatcccagcactttggaaggccaaggcgggacggatcatgaggtcaggagatcgagagcatcttggctaacacggtgaaaccccgtctctactaaaaatacaaacaattaaccggtcatggtggtgattgcctgtaatctcagctgaggcaggagaatcacttgaacctgggaggcggaggttgcagtgagctgagatcctgccactgcactccagcctgagcaacagagcaagactttgtctcaaaaaaaaaaaaaaaaaaaaaaatccgcccacctcagcctcccaaagtgctgggattataggcgtgagccaccgcacccgatggagctgacattcttatggggaatttagacactgtgaagattgagctcacaaataaatgtgtgattacaacagttaggtgttgaagggcaaggaaatgagtctttgtttttattggggatcacgaccaaggctctgagacagtgatgctttgatcatgatgtgaaggctgagtgggagttactaggggagaggagcattcggggcagaggaccagcttgtgcaaaggccctggggtggcagaagggagcattgcccctttggggaacagggagatgccagtgtggctagagatcagagggcaagggggacataggtgagccgaacctcactagccatggtaaggacccatcctgggagccatgagaagcctttgaaagttttcagcaaggagtgaaggggtcagatttacctctcagactactggggaactactgaagtgtctgagttaaagagtgacagccatgaagctagtttttttttttttttttgctttttttttttgagacggagtctcactctatcgcccaggctggagtgcagtgacgcgatctcggctcactgcaacctccgcctaccaggttcaagcaattctcctgcctcagcctcctgagtagctgggattacaggagtgtaccaccatgcccggctaatttttgtatttttagtagagacggggtttcaccatgttggccaggctggtcttgaacttatgacctcaaatgatccatgcgcctcggcctccgaaagtgctgggattacaggtttgacccaccgcacccggctcgaagctagtatttttgagaggttcttgcgtgttgttctagggcagaggtgcttaccctggggtccatggactcaaaggtagatttcacagggttcatgaacctgaatggattcaattattttaattagcttctagctaaaattcacttatgaattccgcccattatgaattaaggcaacaaagcacagtggtaattgtagtacacggctttgtcctcagcggaaatcatagatattctcagattatattacagtagctgcagatgttgtgaaatgttgtctgggctcatcattgctttgaaactgtggagttattttaccctattatttaatgagtttacaaagaatcacatgttactgtatctttttttttttttttgagatggagtttcgctcctgttgcccaggctggagtgcaatggcacgatctcggctcactgcaacctccgcctcccgggttcaagtgattctcctgcctcagcctccccagtagctgggattacaggcgcctgccacgacacccagctaatttttgtatttttagtagagacggtgtttcaccacgttggccaggctggtcttgaacccctgaccttatgtgattcacccacctcggcctcccaaagtgttggggttacaggcgtgagccaccgcacccggcctgttactatatgttattttgtttaatgctttgataaccatattccaaggtagttggattcctctgcattcctgcatattttattcatgaattcatgattctgtgcagtgtccacaggcttccttagaatgattaggggcacaagaaatattgggaaccccctggtctattttcattgtaactggcagaagggctcaaataagacaaaagagaaataattggctccctaacagagaagtccatggacaccctacattcagatgtttgaacgatgtcctcaggagcccatttctctccaactctggcttctgctggcttctgagtcacctccttcttaggcaagtcctgcccacaccatgcccacgctcaggctgtgatgacctgggcagctctgggcttaactagccctttcagccaggaatccagtagataaacggaggacatctttctggattgcttttgtgaaactctcagagatgaggcttattggctggcatgcctgggtcatgtgcccatactaaactaatcacagtggtgaggaacatggagtactctgattggcctgcttgggtcatgtggcaatcctgagccaattatattgatgggaagaagtattctgattggcctgcttgggtcatgtgctcatcctggaagcaaggtaggcagcgattgctgggtgacttgtttatctcgaaatcaggctggattagggtcttagtggcaggagtgtccaatctttcggcttccctgggccacattggaagaagaagtgttagtgtggaagaagtgaatttagtctaacactaaggatagtgttttagcttatagctgatgagctaaaaaaaaaaaaaaaaaaatcacacacacgcaaatctcataatgttttaagaaagtttatgagtttgcgttgggcctcattcagagctgtcctgggccgaatgcggctagtcgtgggttggacaagcttggtctagactttcatggtctaaagttatggctctcctaattcctgcagtgagataagacccctgcagagaatgatgacaaccggtgctcatatagtgcttgttgggtgccagggactgctgtagtactttatacatatttatcttcacagtccattcagtcctttcaagaacactaggaggtgggtcctattactaacttaatagtgctaaatatatacacgtactatgtaccctcacacacacacacacacaaatagtgctgacaaggtcattatcacgcaattggcaaatggcagccctagaatcccaggcccagctcttctctataactatgttgcttttccttgcctgctaggggaccttaggcgagggttgcccctcctgggtgtcagtgcttccatccataacacaagaattggactgacagttttcgggggttggaggtggagctgggaggggcgtcagggatgagaggtgtggggcattgggtcataaggcctttgctaagtcagcctggcttggagcttctctgtttcttttcccagggctgttcccgacacagcagtgcccacagaggcctactgactgcaggaagcagtgtgagcctgactactacctggatgaggccgaccgctgtacagcctgcgtgacttgttctcgaggtaagggccttgttctctctccagggcctccttctagggagcatgaggggtcctcagaggagaggtgaagaatctggaaggtggagagcatcatgatttgatgtctgttctctgaattgtcctcctggtgcctcagtttacctctctgcatttgtgatttgatatcagccatgaccttttgcatccatactttcacagagacttaacatgtttcctgaaggagaggactcacatttttttgagtttaatcctcaccacagccctaggggaggatttcttgcttatccttactttacaatgaggaatttgaggatagggaggttaagggcctttccaaagttacaaaactctggtaagtggcagaactggagtttgagttgtggcctgacaccaagagctgtgttcttttcctaagatcacaggacttccaggaaaactgtttcagtatgaccttttattgttagtctcttattatggttagagaatgcagtctgtgtgctatctagtgtttatttttgtgtggatttttttggggggtagggtgggggaaatttgttgagatctttttgtggtctaataaataataaatgatcatgtattttcagagtgttcagtgtatgggtgttttaaaatgtgtattctgtttgttgcgtataaagttctctacatatctattaagttaagcttgttaattgtgttatttaaataatgtgtacccttatttacttttatcacctttatttctgagagatgtgttaaaatcttatctcccagtatacttgttcatctattagattttcattgtgttctttctatttttgcttcatatatgtcaaagctatgttattaggtacataaatgttcatgaatgttatgtttttttggtgggttgggctttttatccacatgaatatacctctccattccttgtaatgccttttcccttaatttcacatttgtttggcattaatattgctattccttcctggaagaagtagcaaaggttaaaaagaaagaaaagtaataataatactgccatttcttctttctttttattagcatttatctggtgtatctttgaatttctaaaagtaatgactgcattttatgaaatgaaaattataaacatttattatttaaaattcaagcaatacaaagagtgtaaggaagaaaacaaacattgccctccccagccctccatctatagataactactattatcattagatggctgacacgcctctacctctctgtataaagatgggtaggttagtaaccagacagcctgtacacacttacaaagaaggaattttaagagaatggcaacatatttatggcattaaaatgataatatttaattttagtcaaaagtatcagaaaaagaaagcgaagtgaaacagaagaatgccaaacctcagtcagattaatgtatcttcagcaaaagatactgcaattcctttaaaaaaaaaaaccctctaaaattaagaaaggaggttatgaaaatcagtaagtggttaataatcatttcagaatctactatctcttgcagtaaaggcaaaatctgcttagtttgagttttggacagtagagaatagattgactccctgtaatgaagaacaaagtaattatttttcccacctcctcatcctcttcctgacttttattccttacacaaattttactttgtcataatctataatgtttatattctcatctgcaaccataagtcccttggcatgttagccttaacattttttattattcatgatgagtttatttggcacagcttctctgttcctgagtttttcactttgattcatcatttgagtgattggattacactgtcaggtggatttttcaagaagggctcgtctttgcaatattctctgttatttcatgtttgaggatgcttgtctgttgcctatatttttgttttcttttttttctttttgagacagagtctgactctgtcgcccaggctggagtgcagtggtgcaatctcggctcactacaacctctacctcctggattcgagcgattctcctgcctcctgagtagctgagattacagggatgcaccaccacgcctggctaatttttgtatttttagaagagatggggtttcatcatgttgcccaggctggtctcaaactcctgacctcaagtgatccagccgccttggcctcctaaagtgttgggattacaggtgtgagtcaccattcccggcccaatttcttatctttaaattttaagacagggtctcactttgttgtccaggctggccttaaactccagggcttaagtgttcctcctgcctcagcctcccgagtagctggggctgcacttgcatgttactgcacccaacttacaatttttttgtgtgtctctgaggatataaattatagtcatgtattgcttattgacaggaatacattctgacaaacgtgtcattaggcaattttgtcgttgtgcaagcatcctagattagtgtacttacacacacctacatgatgtagcctactgcacacctaggttctatggcagatccttttgctcctaagctacaactctgcacagcatgtgactgtcctgaatactgtaggcagctgtgacacaatgtgagtatttgtgtatctaaacatagaaaaggtgcaataaaaatacgacataggccgggcacagtgactcacacctgtaatgccagcactttgggaggccgaggagggtggattacctgaggtcaggagttcgagaccagcctggctaacatggcgaaaccccatctctactaaaaatacaaaaattagctgggcgtggtggcacgtgtctgtagtcccagctactcaagaggctgaagcagaagaattgcttgaacctgggaggcggaggttgcagtgcgccgagatcatgccactgcactccagcctgggtgatagagtgagacaccatctaaaaaaaaaatatgatatgaaagataaaaaaaatggcacacttgtacagggcacttaccgtgaatggagcttgcaggacacgaagttgttctgggtgagtcaatgagtaagtggtgggtgagtgcgaaggcctggggcattactatgcactactgtggactttatcaacactgtacacttaggctatactaaatttataagacacatttttctttcttcaataataaattaaacaactttttcactttataaactttaactttttaaacttttggctcttttgtaataacacttagcttaaagcacaaacacatcgtacagctgtacaaaaatattttctttatagccttattcattacacttttttctactttaaaattttattattttattatttttaacatttttaaattaaaagctgagacgcaaacacctacattatccgaggcctacacagagtcaggatcatcagaatcaccgtcttcctcctccaaatcttgtcccattggcagcgtgcagtgactcacacctgtaatcccagcactttgggaagccgaggtgggcagatcacttgaggtcaagagttcaagaccagcttggccaacatggtgaaaccccatctctactaaaaatataaaaattagccgggcacgttggcatgcgcctgtaatcccagctactcaggtggctgaggcaggagaattgcttgaacccgggaggcggaggttgcagtgagctgagattgtgctactgcactccagcctgggtgacagaatgagactctgtctcaaaaaaaaaaaaaaaagaatcctgtcccattggaaggtcttcaggagcggtaaggtaacatgcatggagtatcgtctcctatgataacaatgccttcttctggatacctgcagaaggacctacctgaggctgtattacagttaacttttgttttaataagtaggagtacactctaaaataatgataaggccggcttggtggctgatgcctgcagtctcagcacttagggaggccaggctgggagaatcacttgaggccaggagtttgagaccagcctgggcaacacagtgagatccccatctctacacaagataaaatacattagctgggtgtggtggcatgcgcctgtagtcccagctactcaggaggctgaggtgggaggatggcttgagcccaggaagttgaggttacagtgagctgtgatcatgccactgcactccagcctgggcaacagagcaagaccctgtttcaaaaaaaaaaaatgataaaaagtatagtacagtaagtacgtaaaccagcaatatagctttctatgatcattatcaagtattacatactatccataattgcatgtgctatgcagcacttttatacaactggcagggcagtaggtttgtttataccaacatctccacaaacatgggagtaacgcacgtgctacgacattgccgtggctatgacatcactaggcaataggaatttttcagctccattataatctcttttattgttttttttgtttgagatggagtcctgctctgttgcccaggctggagtgcaatggcgcaatctcggctcactgcaacctgggttcaagcgattctcctgtcttagcctctcaagtagctgggattacaggcatgcgccaccatgcctggctaatttttgtattttttttaggagaggcgggatttcaccatgttggccaggctggttttgaactcctgacctcaggttatccgccctcctcggcctcccaaagtgctgggattacaggcgtgagccaccgcgcccggcttccattatgatcttgtgggaccatcatcatgtacgccatccattgttgactgaaatgttgctctgtggtgcgtgaaggtatcatttctaatgttttgttctgttttccctcttttctgcctccttgagtgttagtgctctttgcattcagagctcctcttccttggcgctggttttcctctgatgtttggcgacttctagttctgtgcacatcatatctcatgatgccggtggtctgcgaatggggcttctgaaacccacctctgagggcaatggggctcaggtggggctgcaacagtctctttgcgggaagacgcgtggcctctggctctgtggcatgagtgatgaggagctatccagagcctttcccccttcttcagagagtcccccttggctgcattctgggctgtggtctccttcactctgatcttatctgtcctctgccttccgtatttcggggagttgtcttcgtttctgatctgccaagcttgccccttcttggtctccaggcctgttacacattaattattagttttaccagtgctatttttgttttgttttgttttgtttgagacggagtctcgctcttttgcccaggctggagtgaagtggggccatctcaactcactgcaacctccacttctcgggttcaagtgattttcctgtctcagcctccccagtagcttggattacaggtgtgcaccaccacacctggctaatttttgtatttttagtagagacagggtttcactatgttggccgggctggtctcaaactcctgacctcaggtgatctgcccacctcggcctcccaaagtgctgggattacaagtgtgaaccaccactccccgcctagctgtactttttatgtctgttaaccaacctgtgatttcctgcttttcctgccagcagttgttattatctgtctttttgattcgagtcattctagtggttgtgaagtggtatctcactgtgattttgacttgcatttccctaatggctaacggtgtgggacatttttcatgtgtttattggccagctgtgtatcttctttagagaaatgtctattccagtcctttgtccattaaaaaaattaataaactatttctggctgggtgcagtggctcacgcctgtaatctcagcactttgggaggccgaggcgggtggatcacctgaggtcaggagtttgagaccatcctggccaacgtggtgaaaccccgtctctataaaaatacaaaaaattagttgggcgtggtggtgtgtgcctgtaatcccagctactcaggaggctgaggcaggagaatcacttgaacccaggttgcagtgagccgagattgcgccattgcactccaacctgggtgacagagtgagactctgtcttaaaaaaaaaaaaattaataaactatttcttagagcagttttaggtttacaggaaaattgaacagaaaatacagagttcctatataccctcaacccccttcccaatctcccacagtttcccctattttttgtttgaaacagggtatcactcttttgcccaggctggagtgcagtggtgcaatcacagctcactacagcctcaacctcctgggctcaagcgatcctcccgcctcagcctcccaagtagctgggactacaggcatgtgctaccatgcctggctaatttttgtattttttttttgtagagatgggatttcaccatgttgcccatgttttatagagatgggatttcactatgtcgccatatgagggcaaatgatcctcctgcctcggcctcccaaagtgctgggattaaaggcgtgagccactgcacccagcctcccctgtcacgaacaccttgcattagtgtggcacaattgttagcattgatgacctgataatgatgcattattattactaactgaagtccatagtttacagcagggttcactctttgtgttgcccattctagggctttagacaaacggatgatgaccacgtgcccaccatcaccgtggcatccagaatattttcactgccctaaatgtgtcctgagctcgtcggttcacctctccctccccctgaacctctggcagctactgatctttttactgtctcgatagtttcatcttttccagaaatgtcatgtagttggaatgacagtgtgtggccttttcagactggtgtctttcatttagcaatatgtatctaagtttcctccatgtcttttttttatttttttgcattttaaaaaattggtacattaatttaatttttaatccaattttagtggtcaccagggggttgagctgggaggcggaggctgcgttgcggactgcacctgccctctccccctcatctcaagagctatctggagagacgccttccttctgttcccctctgtgacccctgtctgtgtcccttagacgacctcgtggagaagacgccgtgtgcatggaactcctcccgtgtctgcgaatgtcgacccggcatgttctgttccacgtctgccgtcaactcctgtgcccgctgcttcttccattctgtctgtccggcagggatgattgtcaagttcccaggtcagtgtccccacccttaactcaggacagagatctatgctgttgctgctgcaccttccgcccaccccagtgcactgttgacttccgacctcccgcttcccggagactgttggacagatcatgtctcctttggcgatgggccagggatgtacccagcacccagcccttctgctgccctcccccaccttgtgttccaggtgcagagagaccctgctgtcccctggcatagacctggctggaggaggtcttgctttggtttgaggctcaaggcagaagttatctgatgccccataaacaagaagggaacctcaagtctctgtcctgggagtttcctagaagattggggttggcttccccctttcaggttcagggcattgggagttagaggtgctgagagatctggccccaggctcaagacttgagaaacttgggtttcttttccaacttaccgtgtgacctcagacaagtttcttacctctctgacttctacttctctgatagtacaaggtgtcagggctgcttttaaccagagaaggggtatgggccacagaacctgtctgggtggagttgggaccatcttccagaagggaggcatgaggagtgggtgggctttggagcacagcacagagtggctgccgcagttgcagactgtatggagccggggagatgggctcagaggcagccctgtgtccactgtccactgaggagaaaagtgccacaaagtgcctgtggtccctcccccaaccaggtccttctctggagtcccatgccctgttgtgcaaacctggggattggcagtcacccccatcgctaccactgcctgccccttttatccttccctcgttccctcatccttcacagccagcccatcctcgagtcctgtagatttggcctccaattatcttccccaccttctcaccccgaataccttctcttatacagcccccatggcagacagccagaatgacccttgcaagaccaaatctgaatctgatcctctctctctctctctctctactcactcactctctctctgtctcacacacacacacacacacacacacacacggatatatacctgaaatgcttcagtatcttcctgttactctaaagataaggacacaaggccaggtgtggtggcttacgcctgtaatcccagcactttgggaggccaaggcaggcagatcacttgaggtcaggagttcaagaccagcctggccaacatggtgaaacctcatctctactaaaaatacaaaaattagccagccctggcagcaggtgccctgtaattccatttactcaggaggctgaggcaggagaaccacttgaacctgggaggcggtggttgcagtgagctgagattgagccattgcactccagcctgggtgacaagagcaagactccgtctcaaaaaaaaaaaaaaaaaaagaaaactccagggactcaccacggtgtccttcaggtcccaaggcccccagttgacctgccttcttctcttcatgtttcagagccttcttacatttattttgtacataatgtccagggcttttagcggttcttggcgggaggatgaggggaaaacgtgtctaagccatcttcccagaatcagagtctcaggatgtgatcccaacacagccccctcctttctcccagcttcagctctcagcaccaagccctcactctctgggctccacctgcgctgcccttcttccaggttggaggacgtgtgtgcttctctgtcccacccgccctctgcacgtgctgttctctctgtcggagacacccttccctccccattcacttagtcaaatcctactcagccctgagctctccaccccacttcctcaagaggccttccctggcctctcactagggaagctggtagcactgtgtcctttgcaaatgtggatacatacctctctctgtctcttggcttgatcaatgtctgtctccctccctggctggaagcttcctgagggcaaagaccatgcccctggtgtccatcaacatctccccactgcctgatcaaatgctaggcatggcacctgctccccatagagattcattgaattaagatatggggacacctgacagggagctccgagctggtgggggggtggagttcaaatctggtcaaattccagggtcgggggagagcgctctgctaaggaatgatggaggcctccacccataagcaggggagagtgctggagtggactgggcagcagatacctaggattttgcaaagatttgcaactgtggggcatgttcccacccgcctctggacctcggtctccccatctctcaaatgaggaggtataactgaaggccttgggggcctctccaaaaaggccaaacttcccaaaagtttccagctcagaaacttctgcatctttgtgaaaaacatcttgagttcagttgttccagccaaggcttcctgctggagggactgtctgggcagtgttcctgagactgccacacagcggcgccagaggcctccctttgctgcccctggaccccagctgcccaatgcagtgcccctggcccgtggcacgtggccacgcacttaaaatgcagctaggggccgggtgcggtggctcacacctgtaattccagcattttgggaggctgaggcaggcggatcacttgaagtcaggagtttgagaccagcctggccaatgtggtgaaacctcgtctctactaaaaatacaaaagttggccaggtgtggtggcgggtgcttgaaatctcaactacttgggaggctgaggcatgagaattgcttgaatccgggaggtggaggttgcagtgagctgagattgtgccactgcactccaacctgggcaacagagttagactctgtttcaaaaaaaaaatccgataaaaaataaaaaaaatgcagatacgtctgcattgagaagtgctgtgtgtacaatatgcactggatttcgaaaacttagtataaacaagaatataattaattattttttatattgattgcctgcaaacatggtaatattttagatatactgggttaaataaatatactatgaaaattaattgcactgatttctttttaccttttaaagtgtggctcccagaatatttgagctggcctgtgtgactcgcatatctctgttggacagcactgttttagaagtgttctaatctcagctgccaaaccctggttaatctctggggtcccctgtggactcacccatggggcagctctccggggttgttgttttttttccagctgtaaaatagaaagcagtttctgcctccagtcagccaagccccacgctaagagccttcactggctgtctctcctgaaattctcacgtctccataagacagacagtattagccccattttccaggtgtggaaatcgaggtccggagatgggaggtaaattgcccgcggagacagagcaggaaatgtctaagcttaggtgtcatcactccaccatgccacagaacacgagaggtcagcattgctcgcgctcacctccacggaaagcttcagagcgaagtcccacacatacaggccaccatttttttattttttttttttttgtgatggagcctcgatctgtcacccagactagagtgcaatggtgtgatctcagctcactgcaacctctgcctcccggattcaagtgattctcctgcctcagcctcctgagtagctgggattacaggtacctgccaccatgcccggctaattttttgtaattttagtagagatggggtttcactatgttgtccaggctggtctcgaactcctgacctcatgatccgcccacctcggcctcccaaagtgttgggattacaggtgtgagccaccgtgcctggcgacatacgggtcaccttctaagtgatgggatgggagtccagatgggtgtaaggacatagcatttaccatatgtcatgcaatgtgatgggcacctcacgtgcactcttctgtttatcctgacgacagcctggtgaagagtgtatgattataatcatttgactgggctgggcacggcagcttatgcctgaaatcccagcactttgggaggctgaggagggtggatcacctgaggtcaggagttcgagaccagcctggccaacatggcgaaaccctgtctctactaaaaattagccgggcgtggttgcaggcacctgtaatcccagctactcaggaggctgaggcaggagaattgcttgaacctgggaggcagaggttgcagtgagctgagattgcatcactgcactccagcctgggcgacagagtaagactctgtctcaaataaataaataaacaagtaaataaaatggactttcctggcacagttaggacatagcaggcaaactgaggggcactggctagacgatgtgtgtgttttcttctccactctgcttctgtccagcattcttcaggactccttggattgcatgtagcaaaatccccaattttttagcacatgtagcttaaaagtctggggatagctctgagaagcttcaggcatggctggatccagggctccatcttgccccatctctcacctctatttccctctctgttggttcatcggcaagatacttacaagcagctctgcccagcgccagtgggaagacagcttccctttcttacatttttaatatccaaaaccaaaacctttaaatcccaaaccagaatctttaaattctacctcacaggcttgggtcacatgtccgtccctgaactggctcatcgtggccagaggaatgcaacggattgattggtccagcctggtctcatggccactcgggaaagggggttcagtcggtcccaacctctaaccacagatgctgagatcagagggagagtaattccccagggaaagataggctgctttactctgaaggggaacgggtgccaggcgggtgccacctccagatgactgctgtgttttccaagggccccatctccgactctggcctgtggtagtgaagggtgtattccgggagactttgggtccccaacactgattctgaaggcactgctgtcccccctgcaggcacggcgcagaagaacacggtctgtgagccggcttccccaggggtcagccctgcctgtgccagcccagagaactgcaaggaaccctccaggtgactccctggctttgcctcctcctcttcccccaagctggctttcagatgaggctgccccaccccacaggacgcccatggtacaactgggctgggggtgtaagcgggattcagcccatggtgtcagcactttggggtgcctctctgccaagcccctcagatcatttgaggccctagggtgtgcccagccctgccctgagcacatgggagacccacagggcttagaaaacacaggccttgctcccaggagcttacagtgggcccgccagaggcagtgggccaagggcctgggaccccatctctgtggaaactgttactcgtgagcacaggcctcccttgccccattggcagaattatcagtcccatctctggcttcttccccagtggcaccatcccccaggccaagcccaccccggtgtccccagcaacctccagtgccagcaccatgcctgtaagagggggcacccgcctcgcccaggaagctgcttctaaactgacgagggctcccgactctccctcctctgtgggaaggcctagttcagatccaggtaatttccccatgaagctgtgggtcgtctccctggggtgctcgattggtggatggcccatgagtgggggtgtttggagcaggcgggcagtgatctgtggtcttttcctggtggggagagaagacggtggtaaggtatgatctagggctgaaagcattgaggggcagaggtagacaccagagggctcattcatttgccagcagtgcagagggcctgccttgtgccggacacccgtgccccatctctccctctatttccctctacgttggtttgtcagagggaaatgggtcccactctgctgttgtgacacttgcgactcagctggccagcctctgcacgtgtccatctgatgccctcctggtctccatggcgaagggtcgaccctcagtcatttttctttttcttttttttgagacggagtttcgctcatgttgcccaggctggagtgcagtggcgcaatctcggctcactgccacctccacctcctgggttcaagcgattctcctgcctcagcctcctgagtagctgggattacaggtgcccaccaccacgcctggctaactttgtatttttagtagagatgggatttcaccatgttggtcaggctggtctcgaactcccgacctcaggtgatccgcccacctcggcctcccaaagtgctgggaggattacaggcgtgagccaccgcgcccaacctagtcccattttattactgaatagccctccatggcgtagatatgccgagctctgtttatccagtttttgaatatttgggttgtttctgccttttgactataatgaagaaagaaaaatacatctttgcgtgtatgtgctttcctttctcttgggttggttttgtaaaaaaaatggatttgtgggacttctaacaattttgggttggagctcttttcctatagttgtaccttctcccgctccatggctttgcttattctctctatgatgtcttttgtttgtttgtttgtggtttgtttttttgaggtgagtcttgctctgtcgcccagactggagtgcagtggcgtgatctcggctcactgcaacctccgcctcctgggttcaagcaattctcctgcctcagcctcccgagtagctgggattacaggcgcctgccaccacatttggctacttttcttttttttagtagagacggggtttcaccatgttggccaggctggtcacaaactcctggcctcaagtaatccacccgcctcagcctcccaaagtgctgggattacagacgtgagccaccgcgcccggcccacaccagtctttaaaagagggaggcaggaggcacccagcccctccctgcccaataccattctgaacaggagttacgctagtgtgctgagctctcagggaagctgttcccaaagttttgagcaggggagtgacagagccatgagacagggttgggggaagctgtggcatggtggcctcaggaggaacagtgggcaggggctggttggggggcaatgagtaccctcctctcgtgtggaatgcacgcagcattcctgtcctctctgagcctcaggactccctctgaaaggctggactgagctgacatgcggagtttgggagctggccacggtgagggatggggggcttcagggttgggtggggagtgaggcctttgccaaggcggcctggcctgcagcttctctgcttctttccccaggtctgtccccaacacagccatgcccagaggggtctggtgattgcagaaagcagtgtgagcccgactactacctggacgaggccggccgctgcacggcctgcgtgagctgttctcgaggtaagggcctcgtccctccccgggcctcagtttacctctctgcatttttgaaccgtgaacttccagtaactactcccccttatgtttgtgggtttttgatgggggtcgcctcttttcagagggcttccattggcatattatttccttccaggaagcgtttgtgaatcacccacctgttccaaactcggctcatcaatgtttgtaactactctgtgattcaagcattgtgatcattccccttttacagaggaggaaacggaggctttgggaagtcagggaacttccaagggctgtgggctggagtttgaacccagacaggtgccaccaggttccaggttctcgtccactccactcgctgcccctatgagccacttattctttttttttttttcccagacagggtctcactccttcacccaagctgcagtacggtggtgggatcatagctccctgcagctgtgacctcccaggatcacatgatccttttgcctcagcctttcaagtggctgggactataggtgcacactaccatgcctggctaattaaaaaaaattttttttcatacagatgggggtctcactatgttgcccaggctgctctcgaactcctggactcaaatggtcctcccaccttggcttcctaaattgctgggattataggcatgagccaccatgcccggcctgcgagctgttttgacaagcacttactgagtgcacagacacagcacgatgcaggtgtggggcttccctgtgcccagcccatcacaacctcccagcgccagcagcaccccgaggggcatgtgggcagggggtgttgctcaggccacaggctgctgtgactgttagaggccctggctattcacggaggccactgggaatgtgtgtctgtctccttgtccagagctgcttttgggcagcaaagcagagtgaagggtcaggggaggccaaaaagaaccacagacactgtttgttgtcattggaggtctctgtcctagttactaaggctgcatagcaaattttcttaaaacttaattgtgaaaacaaatcattctttgtactcacagattctgtgagtcagaattcagacagggcactgcggggacagcttgtctctgctccacaatgtctgaggtcttagctggaaagcccaaaagctgcagatcaggaacttctgaagcttcattcattcacctgccttggggttgatgttggctcctggctgcagccttggttcccttccatgtcggcctcttcgtgtcttacctggggcttcctcatggtctggtggttaggttctaaaggcgaagtctttttctctttttttctttttttgtatttttagtagagacggggtttcaccatgttggccaggctggtcccaaactcctggcctcaagtgatccgccggccttggcctcccaaagtgttggaattacaagcatgagccattgcccccggccataaaagtcttgagagagagagacagacagaaagagagagtgagagagagacagaaagagggagagaaagagtgagagagagaaagagagagacagagagaaagagacagaatgagagggagagagacagagtgagagagagacagaaagagggagagagagagacagaaagagaaagagacggagtgagcgagagagagagagacagaaagacagaaagagagactgagagacagagagagacagagatagagtgtgacagagagaaagacagagaaagagagagagagagacagaaagagagagagagagacagacagaggcagcagccacccctccttttatgacctggccttggaagtcacacagaacttctaccactttctgtttgttgaggcaaccacaaatgtcacttgagaccaagggaaggaaaacagttgtacttcttgacaggtaggtggcaaaggctctggaagggccagaacatcactgcagccatgttttggggaaatacagtctgccacaaccaccatgtggacatatggagaaagaggtgttggctctgggcccagtaattccttcagctctcctaactgaaaccccacgaggcagtggagtggtgtattagtagctaaaggcatgagctctagaacccgagtgccgggttcagatcccgcctctcccacttgatagcctataacctcaagcaggtttcctaacctctctgtgcctcagtttcctctgctgcaaaatgggcatagtattatctatctcagagaaccatgtgagaattgaatacatgattgtaggttaatctgggtagagtgctgagactactgtctcacacatactcagttatcttaagagctataataataatgataatagctgccattgtcccaaatggtttcattcattgctgagctcacacacaccctttgcacaaattccccaaatcctgcccagttcccttgctctggatgttgtaagaagagactgtccagcccttatcattatcatgctgggtctctaagtatcctgctgattgagatctaccctcgcggagaggtcccatttgcctaatctactgatgcagtcgttctgtatttacctctaagtggagcgttgcaaaatattcccgaatacgtacaaatgcattattacacttattaaaaataatacctctaacatggtttttttttgcttttggaggaaaaaaaatctttttttttttttttttttttttttttttaaatagacagagtcttgttctgtcgcccaggctggagtgcagtggcactatcttggctcactgcaacctctgcctcccaggttcaagtgattctcctgcctcagcctcctgagtagctgggattacaggcacgtgccaccaggcatggctaatttttgtatttttagtagagacggggtttcaccatgttggtcaggctggacttgaactcctgaccttgtgatctgcctgcctcggcctcccaaagtgccgggattacagtcgtgagccaccgtgtctggccaaaaaatctttttattattaaaaatttcaaacatattcagatgtagagtgagtcagagatggctgcgtactatcacccagctttaaacggttatggagtcatggccagtcttggctcctctgcacccatgcccgctcaccccgtcccctggaggactttcttttaacagctttagggagagatagtgggcatatggtaaagtgcatagattaaaggatgcaatctgataagttttaacaaatgcatgcagctgagcaaccagccatccccctctaaaagttacctcgggttgcttgtcaccatttcccatcccctgcttatggtcaccatgcaatagcttgcatgtaaatgcgacatacagaataccctcgctttttgcctgccttctttcaccctgcagaattattttgagcatgctgggagagctgctcaacggcatagtcagacgagcatttattttcttgttggatgacccttggacaactgcttctctgtcttcctgggggctctctggaccccctgcccttgccatactgatctttctccgtgatcctcatctgtgtcccttagatgaccttgtggagaagacgccatgtgcatggaactcctcccgcacctgcgaatgtcgacctggcatgatctgtgccacatcagccaccaactcctgtgcccgctgtgtcccctacccaatctgtgcagcagagacggtcaccaagccccagggtaagcagttcccaccccaggcctcgaccacggggtggagtctgtgcccccactgttgtgcctctccccaccaacagccaggggtggaggcaaatgacctacaccctcggctgttcattaggtcaggtttgggttctggttatcctttgagtagtcagactcagtgaatggaatgataaaatccagttttagcattttggcaagagattctgttgattaaaaaaaaattcttcctgaaattattgggctggtaaaatctttatatttttgagatggagtttcgctcatgttgcccaggctggagtacaatggctcaatctcggctcaccgcaacctgcacctcctgggttcaagcaattctcctgcctcagccttctgagtagctggggttacaagcattcgccaccacagccggctaatgttgtatttttagaagagatgcggtttctccatgttggtcaggctggtctcgaactcccgacctcaggtgatccacccaccttggcctctcaaagtgctgggattacaggcctgagccaccatgcccagccccgggctggtaaaatcttgacctgtttgcaaggctgttttattgacttagagagatgaatatcaagtttctgaagagatttctaacaggacggttggctttaccagtgtgcaggaaactaaaaccctgacagttttttgttgttgttgttttttgttttttaagggctttgagagattttaacaaatctccaggtggtttaaaacagatggaagagtggtgacaaaaccaaggggaatggccaggcgtggtggctcacgcctgtgatcccagcactttgggaggctgaggcaggtggatcaccttgaggtcaggagttcaagaccagcctgaccaacatggcaaaaccccgtctctactaaaaatacacaaattagctgggtgtggtggtgggcaccgtagtcccagctactcaggaggttgaggcaggagaatcgcttgaacccgggaggcataggttgcagtgagccgagattgcaccactgaactccagcctgggcaacagggcgaaactctgcctaaaaaagaaaaaaaaccaagtggagggaaggtcacccaatgtgactctgtgagggctgccagagaagtgaggggtgacttgcttctaggacccccagagaggctctgggcttggaagaggcaggcagatgaagagcgggagggaagttgagaggtgtgaggtgtagtggcctgggactactaaatcttcaaacacaacttcaaaatgtattacaatggcatggcatggccactgaccagtttgcacagatgatgcctgagtttttaatccccagtattgtctttttttttcctctttttttagagatggagtctcgctgtcttgcccaggccgatgtgcagtggtgtaatctcagctcactgcaacctccgtctcccgggttcaggcaattctcctgcctcagcctcccgagtagctgggattacaggtgcccgccaccacacccagctaattttcatatttttagtagagacggggttttgccatgttggccaggctggtctggaactcctgacctcaagtgatctgcccgcctccacctcccaaagtgctgggattacaggtgtgagccaccgtgcctggccaacaattgtcttcttgagtcagaacattgaaggaatatccggggaaagttcgggccactagtggggtgctgtcactctgtttgtaaagccctctttacttgggtatttggaagtgcacctgtcaacaggctagccacaccccatcaccctgaaatggaggctgccagctcacactctccgcccatgggcccagggttccctggccaacttcctactcagggaagagacccattgtgaacaggacatactaacacagcagaagaaactgtccccgctcagtgactggaatattcagtagagtccttaggattttattttgtttgcataaatgtatggggtacaagtgtaattttattacatgcttagattgggtggtgaactcaggacgtttagggtatccctcacccaaatagcatacattgtaccccttaaataatttctcatggtccacctacctatacctcccaccccctcacccttctaagtctctgttgccttttattccactctccagctccgtgtggacacagtatttcactcccacttagaagtgagaacaggcagtatttgtctttctgtgtctgaatgtctgcacttaagaatatggccttcagttccatccatgttgctgcgaaagacttgatttctttccttatgatggctgagtagtattccattgtgtatagatgccacatttatctattggtggatgcagcataaccctccccccccacccttttctttttgagacaaagtctcgctctgttgcccaggctggagtgcagtggtatggtctcggctcacggcaacctctgcctcctgggtttgagctattcttgtgcctcagcctcccaagtagctgggattacaggcgtgcaccaccacacccggctaatttttgtatttttagtagagacggggtttcaccacattggtcaggctggtctcgaactcctgaccccaggtgatctgcctgcctcagcctcccaaagtgctgggattacaggcgtgagccaccgcacccggccaagcataacccttttaaaataaatatgaatgagcaaagatttgtaagaaaaaccagccctacaaaggagaataaaaagatacgaaaccagaaattcttaccacacatgaagctttgataaatccaggaatagaagagtacttagcaacattaaattcgtgtctgcagaaaaattcacgaagtcgttacatccataaggtgggcacagaatgctatgaaaaggaacaatatgggatcagagggcaagaaaaggctttttagaaagtgtgcttgtgatcagcccatcatctctaggttctccattcacctttccatccctgccctgccatcaacgatggctccgcctttctcctctgtagggagcatgcagttaagccttgccagcagagggcgctagagggccatcgcaggaggaaggaggcttctggttgcatttgtttttttgtttgtttgtttgtttcttttctttttttgagacagagtctcactctgtcgcccaggctggagtgcagtgacgcgatcttggcccaccacaacctccacctcccgggttcaagcagttttcctgcctcagcctcctgagtagctgggattacaggcacgcgccaccacgcctggctaatttttgtatttttagtagagacagggtttcaccatgatggtcaggctggtctcgaactcctgacctggtgatccgcctgcctcggcctcgcaaaagtgctgggattaccggcgtgagccactgcgcccggccatttgtttcttcttgctcctgctgcctggcctggtgaccaccttgatgtggctctcccaatgcagacattggcacgtgccaggcctcatgtctgcaaaagtgtcctgactccctgattccctctgtgcatcccccaccagccacaggtctttggcaccccaaagtgctccaggcgtctcccccacagtggcagcctcaatttctctgtgcacctgaccagaagcatagacttcaggtcaaaaggacctaccaagagcaaagcaggattaatggaaattacccacgctacatgtaatagatgcaccaccatgattttatctacctgccggttgatggcatttgggttgtttccagtttagggctattatgaatgaaaacagctgtgaatattctttttttttttttaacatgtatgaatttatcttatatcttttattattatttttattatttttagagacagggtctcactctgtgttccaggctggagtgcagtggcatgatcttggctcactgcagcattgaactcctgggctcgggcgatcctcccacctcagcctcccacagtgctgagattactggcatgagccaccatgactggccgattcttgtacaagtctttgggtggatgtatattttcatttttcatgggtaaatacctaggaggagtggctaggtcattgtgctggtcacatagtcagaatgtttttgaggactagtcaaagctggatacctctggtctgatacaaccccttcgttttacacccagagagaagcacagggccgaagctagaaccagaatgcagggatcccaagggtcagcccagagtacttccactggaagacaccacccacccacctccttcttagttctgaacctagaatttacccagctaaattacagtcacttcagctaaattacaatcaagtttgaaggcagcataaaaacattttcagacataaaaggtccagaaggcttttcttcctatatcctctcctaggaagatatttgaagatgtaattcagctaagtgagggggcaaaaaagaaaaacaacaggaagccatggaatctagagaccagcactccatcctagcagagcaaggaagggaagtcccagaatgatgtggtatagaccagttgagccagatcagagcaggaaaatggaaggaaggctccgaggaagtgttcccaggaatagaagagagaattgtagtaaatttcatgattagtagagttgaaaagcctgaggatatggtgagggcacactgtccttttatcaacaagaaaaagaaaggcaattgaaaactcccgggaaaagaaaaagatgacaagaaatatacagtccaaatatgaagatgaaatttcacctgattttaagcgattgctggatgtacaaaaagagaatctgtttggccttgatgctgagacaattctttaaatggcccaaggactgggtgtttggatttaaagagaagtatatccatctggtaaataatattttttttagttcttaaatggaggctgagtaggcaggttcttttcttctcttccagtaggccattaccagagaacacaggcagaccaactaggggctagacaatgccttctcctcaccttcaaatccaaagaggaggaaaaggggaggatcactgactcagggaggaagaaggaaagttacaagttaggtatagtatattcagagaggggatgagaggcacccaagggatactaggttccccccttctgcacatacaggagggacagcagatctgtcgctggatttcagcaggtgtttcagcagcagctgagaccatgggcctgtctagttacatcaggctgccttggagagcaggcagggggctctctcctcatgatgctgactgggaatagccacagttaatgggtttgagcatcagagctccagtccactcaaagtaagtgttcactgaaacccaatgacctttcaaacactgattcaaatactgattaacgagcatgtaggaaccatcataacacatcgcatcatcttccccatagtctccaggctccagctaattcaggtaagagtccagtgaccttccccaaagaggggggttcctcagaaccctacaatgcaagaaataaattaatcctggctttacttttttgtctatttgaggaaaaatctgagaggcgtcacgaacactttgtagaggggagatgtgggtatgtgtgtggggttgctttgtaccacatcaaaaaggggtgcctccaccagggctctgggggtggagaggtgtagtgactgagcataacccacttctaatgtgggccaaattatcctgccccagaaaagcaggaagctttgaagaaggtgcccagtccccaggcaggaggcagtgccatccagaggagagtgctctgggctggaactcgccatctctgtttcctggctgtagctccagccctgcggctctctccatctgtaaaacaaggtagctgggtcagaccagtggtggccagctatgaactggccttcagagacattccgtctggccagcatagcaatccagccacccttcctaggcactcaagaggaatgaaattatacgttcacacagaggcacgcacaagaatactcacagctgccttgttcgtcatagttcaaactggaaacaacccaaatgtccatcaactagcgaacgggtatgtaaacagtggttcatctgtacaacagaacgccatttggcaacagaaaggaatgaagctgaatgaatatcaaaaacattatgcagagtggaagaagccagaccccaaagagtacatactgcatgattctgtcgacatgaaattctggaacagatacactcctctatagtgacataaagcagatcggtggttgcctggatctggaggtgggggcagagtgagtgaggaggggcactagggaaccttctggagggatgagaatgttctgtattttgattggagttagttacctttgtcagaactcatcaggctgtacacacttagggacattttctttttttatttttacttattaaaaatagagacagggtcttgctatgttgcttaggctggtttcgaactcctgagctcaagtgatctgcctgcttcagcctcccaaagtgctgggattacaggcgggagccaccctaccctgccaggggatactttcttgtatataaatgttgccttaggctgggcatggtggctcacgcctacgatcccagcactttgggaggctgaagcaggcagatcacttgaggtcaggagttcgagaccagcctggtcaacatggtgaaaccctgtttctactaaaaatacaaaaattagctgggcatgttggcaggcacctgtaatcccagctactcaggaggctgaggcaggagaatcacttgaatccgggaggcagaagttgcaatgagctgagatcgtgccactgcactccagtctgggcagcagaggaagactcaatctcaaaaaattaaacataaataaataaataattccttaataaagttgatttaaaagaaaaaaactttaaaaattgaggctgtatttaaacattaggcgatttcagttttctcttaaaagcaaaaggtctagcgtcactgtttcaccttcctgggtgaccacagctgttagagacaagtagcaacttctccactttgttttatttattttgagtctttctctgtcgcccaggctggagtgcagtggcatgatctcagctcactgcagcctccacctcccgggttcaaacgattctcctgcctcagcctcctgagtagctaggattacaggtgtgtgccatcacacctggctaatttttgtgtttttagtagagatggggtttcaccgtgttggtcaggctggtctcgaactcctgacctcaagtggtcctcctgcctcagcctcccaaaatgctgtgattacaggtgtgagccaatgtgcctggccagcttttccactttgatcttttgaaacacaaatctgactgtcttagctcccacggtgttgcctcgctggaagccaccagtccctgctggttaactctttcctggagacaccagcctccttggcgctggttctcagatgttacgtcccctctgcagatatggctgagaaggacaccacctttgaggcgccacccctggggacccagccggactgcaaccccaccccagagaatggcgaggcgcctgccaggtgactcccccaccccttctctctgtttggctgctgcaggagggagctgtccctgccatgcccaggggatgcctgggaggcagctgggctgggggtggaggtggggcctgggctgctcttttgttaaatgtgtgcccatctctttgctgacaccattggaaagccagaaggccttgaaacccagtccctgccctcaaaatgcctggcagagactcggggcagaggatctaggggcccaggctctggttgcgcagtctccagagaaagggaattattcctgaagacccacttccctcttcccatcttcatcactcctgccttgggcttctccccgcagcaccagccccactcagagcttgctggtggactcccaggccagtaagacgctgcccatcccaaccagcgctcccgtcgctctctcctccacggggaagcccgttctggatgcaggtaatggtcccagcccactcacccctactcccagcaggggcttcctcctggggaagtgtggattgggggagccaggagggagcttctcctttgtgggtatggtctgagaagggggattaaggttgaccccaggtttctggcttcttgagttggtgctgtggctctggcacttgctagtgactattcttttctttttgaaacagtctcactctgttgctcaggctggagggcagtggcacccatcttggctcactgcaacctccacctcccaggttcaagagattctcctgtctcagcctcccgagtagctgggtttacaggcgcttgccaccacgcctggctaaatttttttttaatttttagtagagacggggttttgccatgttgtccaggttggtctcaaactcctgacctcaggtgatccacctgcttcagcctcccaaagtgctaggattataggtgtgaaccactgcgcctggctgctagtgactattctttaattcttgtaggcaggaatttttttcacagcttcatcctcgtggcttataattgctactcagaaaataggtctttgttgattgatttcatgactttgactagttgttcgagcctttgagcctcagttgtctcatctatacaatggtaatggcagagaccgtgcagggttataagcagtgtagcattgtagacggcctctgtcagagttagctcttaggctggacgcggtggctcacgcctgtaatcccagcactttgggaggccaaggtgggtggatcacgaggtcaggagtttgagaccagcctggccaacacgatgaaaccacatctctactaaaaatacaaaaattagccaggcgtggtggcgcgcgcctgtaatcccagctactcaggaggctgaggcaggagaatcgcttgaacccgggaggcggaggttgcaaggttgcagtgagccgagattgcaccgctgcactccagcctgagcagcagaatgagaatcagtctcaaacaaaacaaaacaaaacaaaacaaaacaaaacaaaacaaaacaaaacaaacaaaacccccaagagttagctcttagggaaagatgccaggttactcattttaggacttgcagttctagtggctgacacgaggtggcagtagtgctccggccagagtttctgaaagtgcggtcccgtctggcagcattggcaccggctgggaacttgttaggaaagcaaattatgggccccatcccagacctagagaatcagaaactgcactttaacaagatctccagggcactcatgtgcacattaacgtttgagaagcacttaactggcatatactactttttaaacatctaaacatggacttcaataaagtgcaatcactagctctatgatctctgtaagtgacaaaagggaaaaacgaagcgagtttagtaccgaggtgtgaagaagtagatctagataggggttaagagcgtggccctgcagtccccccggcctggcctggcctgggctggggctctgccacttactctcagggtgaccttgggcaacttaacgaactttcgtgagcctcagctcccctcatttttaaactgaaggtagtgacggtgcctagggcatagggttggggatcattcattcagggaacgcttgtggggtgtgtttatgtgcagtggggactccatgcctgccctcatcaagcaggtctagagggttggccgggaggggactgggttcaacctcttccttcccctcactgcttggccctccccaccctgactccggccacaccagcagtgctgccagatgccggtcacaccgggccctcgtccacagtccccaaattttggtctattggacctcaattcctttgttctggctcctagacgcctcaatttctcactctctagacacagtttgcccttctctcagccttcaatagttgatcagcttcctggagccaggcgagggagggctggatgagataagagccttggcttggaaaggacctgttgttgttagccatgatggaagctgtgtcccaggagaaggaggaagtcgtctggggctggggctgtcttgtgtggttgcagcaaggcaaagagtgtggggcgtctctgtgttccagggccagtgctcttctgggtgatcctggtgttggttgtggtggtcggctccagcgccttcctcctgtgccaccggagggcctgcaggaagcgaattcggcagagtaagtggctgtgtccttggggccttggggaggacaggttgctctctgccagcctggcctgggttctttccctgcctgctcctgctctctgaggccgccacccccagccttcctcctggtgtcgtttcagagctccacctgtgctacccggtccagacctcccagcccaagctagagcttgtgggtgagtgtccagccgtccaaaggggctgcccgagccagaggaacacagggcagctctgggcccggggcgtgggctccagagactgaacttctaccccagcctcgaagctccctgtctgtggctcctgtcgcattctgtacatctgtagggatgcaatgtgggtgaaaactcatgcgtgtggagaatgcaatgaggtgaagactgtactgggtgtgacgactgtgtggcttgcccagagcagcacctggatggatgctggcatgaacgtttaaaagtctatcttgtctgtcactttttcctccagtacccccagggggcattcctgccagccttgccttcctctctacattctaccctccctttctccctctccctccttctctttctctttcccctctctccccctcttctaccacctggcaagtcagcccaggggcaggaggggaaaggagcacatggggcaagagggaccctggttctgccacttacaagctgtgtgaccccgggtgagttactgaattgtcctgtgtctcagtttcctcatccggaaaatgcagatggtagaatctacttcagaggcttggcctgtggattcgtcgaggtcgggctgttaagcgcatcgtggagtacctgcctgcagtcggtggctgctgcctattgacaggctggcctgtgcctggggctttttccttcctggaagcttcaggccttcctgagtcctgggtgcttctgaccccctccctggtccctgcactctgatccctgcccagcctctgggccagctcttccaggcagcccttgggagctggaaccctcctcacctgtccaggcagggtcgtctatacagcgtgtgtcttctagctctcacctggggcagggggctcccagctatcttgtgccaagcaccttctctctcctgggcagccccttcaaggcaggccagggtcttcctcagcactgcatggcatggattgggtgcctgctctgtgctgggctctgatgggggaatcgtctgagccttcgtttctgatttgcaaggtgggctcccatacaggcttcctgtactcccccagtgatgacctttgttctgcaaggaggaggcagggctcagcaaggtggacggctggcccagggccacacagcctggcagtggcacagccagcctcaggcactggtcctaggggttttggtttgtaaagggctcagccctgtcccctcttccttccccctgccagctctgtccaccatcgcaatgcctacccaagagccacgtgctcagcctaaggccaggccctggcccgtcccctgatctccccaggacccttgcagaggcccttgcataggctgactgttgacttgggcacaaaaacacagtccactgaggcatgttttgaatttgacgagtttcacaagcaagcactgtggtccctgtgcaaggggggtttttgtgttttgatagtttcaagcctgtttccatgacctgtcaggctgagtgtctcattgaaaccggcgtttgctttcttgacatttttctagtattagaatttccattgccgtcagtttattttttttcttcaaacctctgtgagagcagttttgttacagaagaaaaaaagaaagaaagaaagaaaacaccttcccctaagaagccaggtctacaaagaactgagccctgagactcaatggtggacatcttatctcaggtcgtttttgaccctctagcttctggtgggaccttggggtctgggttccgaggctcaagatggacagaaagtgaagccaagacaggcaagctcacagggcaccgggtgagaatggaccgagctggccggatgcccctttccctcctgagccgtgggtggtgaaggagggaaggagcactggtttattggcactggtttattggttcgttcattcatctattcacatggtcttcacggagcacttcctccttgcaggctctgtgccgggcccagaagctgttctagctccctccaagcttttagactaattccgactgcccgcagaggccaaaggcagacgggaggggagtgtgcgccccttggcctcccacatcccagacctggggcagagggtgctcttggttcctttgagcagtgagcacatcagggatctgtggtccgtgcaggtgcgatgagaggcccaccaaccagccctcgagtggatcaaccttcccgtgtgtgtcctcggtgacaggcatttgcaaagcacacacgtgatctcatccactcctccggtggcctgtgaggtacttactgttatccccgttgcacagattagcagcctaaggcacaggatggtgaagtaattcgtttaaggccacgtgctgggtgagccgtaggacggggattttatcgtggttgttgagatgtttgtaaaaagatttttcacccttggcaccattgacatttgggaatggatggttctttgctgtggagcgctatcctataggacgttgtacagcccctctagatgccagtaaccttccctacttgggacaaccaaaaatgtctctagacattgccatgtggcccctggggaaaacctcctggttgagaaccactggtctaaaattctttttttttttttttttttttgagacagagtctcgctctgtcacccaggctggagtgcactggtgccatctgggttcactgcaacctccgcctcacgggttcaagtgattctcctgcctcagcctcctgagtagctgggattacaggctcctgccaccatgcctggctaattttggtatttttagtagagacggggtttcaccgtgttggccaggctggtctcaaactcctgacctcatgatccgcctgcctcggcctcccaaagtgctgggtttgcaggcatgagccaccatgcctggccttaaaattcttttaatccttcatttttatgagcacttgagtcaatttctattattccagggagatttaggttgaaagaaattctttttttgttttgaaacagtttcaaacttatagaaatggtataagtatgaagaattcattttgacctgaaccatttgagagtaactgactgactggatgtctctcaccccgaaaacttcagtgtgtgtttcagacagacaagggtgtattttacacgatgtggtaaggatcgtcagaattggaattcacactgatacatgacccacaatgaattctcaggccctgttgaagtttctttatttgtcccaataatgtcctttatagcagaggactccagctcagggccacgtgttacatttgcttgtctggtttctcgagtctccttctgtccggatccgttccccaggcgtttctttcacttactgggaagagcgcaggctggtgatttcatggatgctccttgctttgggtttgtctggtgttttctcccgagtggattcaggtcatgcatcttgggctggaaggtcccaggaatgatgctggcctcttctctctcagggcgtcctgccaggtttcgatgtctccctttcctggtgctgtgtactttgagcgctcgacggaggtgatgtcctgccgggcctctccactgtgacgtctccatttgctcctcggtcattactaagtctttaggggcgttacttgagactatgtcaatagcccattcttcagcagaccttcattttctctatttatttgtttatttttttgagacagggtctggctctgtcacccaggctggagtgcagtagtgtgatctcggcttactgcaacccccgcctcctgggttcaagcaattctcctgcttcagcctcccaagtggctgggattacaggcgtgtgccacacaatgcctggctcattttttgtattttcagtagagacagagtttcaccatgttggccaggctggtctcgaactcctggcctcaagtggtcctcccgcctcggcctcccaaagttcagggatgacaggcgtgagctgccaccgcgcccagcccagaacttaattttcttcacttacatatttatatctgtatggattcatggggccctgttctgttcaatgggttgtaatctcttaccatcattttttattttggtgctcaaatggtcccagatgaggtcagggagagcccctttaagctggctcttgtgtgctttggtgtatcctcatcctgtgctttgagcacgtcccttattctgagatgttcccagcttaacttgtgtgctcctgccccggccctggaatcagctgcctctccaaggagcccggggtttgcatctcggggtacctgttgccaaagcctagctgaacctctgtgccaaattccccccttgggcctgttctgcttcccacagcactggggaatcacaggccagagaggggaggggactaaaagtggagaataacagggatggaagggaccgagagctttacatcgcatgtgagaacgcacgtgctccgtgagcgtgggcttcagagcagcctgtgacaccgtgcacttgtgcaagggggcctgctgctgcccagcatggtcctggacttgtgtccctgggggtaccagacaggcttacaagaagacagtggttattccaaaaggcaaggaaaccaacaaataagactagcagatagaatcaacatttttaggggaagagcagttatgaaatctgacctctgtacttggcaagatttgttctgggtctttatcaaaatcctcatgggttgtaacacggctcttgtcaatgtcagagccttccagattccgcctttttacctctgtgattttacacttgtttgggagagtcggtattgaactctgactttccattcagtgtgacggagtgcagagccatgttacttaccatcctgggcttttcctgaacctgctgtgtgctcaacagcatcctggacaccttctttttaaaatattttaatttttaaaaattctaagtaggccaggtgtagtggctcacacctgtaatcccagcactttgggaggccaaggtgggtggatcacctgaggtcgagagttcaagaccagcctggccaacaagacaaaaccccatctctactaaaaataaaaaaattagccaggcatggtggcacacacctgtaatcccagctactcgggaggctgaggcaggagaatttcttgaacctgggaggtggaggttgcagtgagctgagattgcaccactgcactccaggctgagcaacagagcgagcctccgtctcaaaacaaacaaacaaacaaacaaaaaaacattctaagtggccttcatttttaagttttttgttttttgttttggagacagggtgtcactctggagtgccatggtacaatcatggctcactgcagccttgacctcctgggttcaagtgatccctcagcctccccagtagctgggactacagatacacaccaccacgcccagctaacttttctattttttgtagagaccaggtctccctttgttgtgcaggctggtctctaactcctgagctcaagtgatctgcccacctcggcctcccaaagtgcttggattataggcgagagccactgtgcccagctagtcctcattttttttttgaggcagagtctcgctctgttgcccaggttggagtgcaatggcgcaatctcagctcactgcaacctctgcttcccgggttccagcaattctcctgcctcagcctcccgagtagctgggattataggcgcgcgccaccatgcccagctaatttttgtatttttagtagagatggggtttcaccaggttggccaggctggtctggaactcctggcatcgtgatttgcccacctcagcctcccaaaatactgggattacaggcatgagccaccacgcccagtctcatttttaaaaatagttttagatgtacagaaaattggagaagacagcacaggagttcccacatgccccacacccagtttcctctgtgattagcatcttaagccagcatcgttcatttgtcgaaatatgtgaaccattattgacacaggattacaaacgaaagcccacactgtgttcagggttcccttgcattgcctaaggttccaggatcccatccaggagccacgtcacattcagtcatcatgtcgccttaggctactctggcctgtggccgtttctcagatcttgtttctcaagaccagtttccctgatggccttggcagtttttgagtattgatcaggtgttttgcgggacgcctgtctcctgggatctgtctgatgtcttccccatgattagactggagttatgcattgggggaagaagaccacagaggtgaaacgtcatgctcatcacatcaaatcttggctgggcgcagtggctcatgcctgtaatcccagcactttgggaggccaagcctggcagatcacctgaggtcaggagtttgagaccagcctggccaacatggtgaaaccctgtctctaccgaaaatacaaaaattagccgggtgtcatgacacgcacctgtagtcccagctacttgggaggctgaggcaggaggatcgcttaaaccccagaggcagaggttgcattgagctgagaacgtgccactacactccagcctcggtgacagagcgagactccatctcaaaaaaaaaaaaaaaaaaaaaaaatcaacctgatttaccactgggcaccttcacttttgatatctcttttaatcttctcaacaagccccaaagttgatgtgattcatcccattttccagctgggaggacagaggctcggagaagggaagtaatattgtgctgagtttcaccgccaaggaggcccctgctccagggtggctaagcggcctcattgtttttgacatttggctggttttcaatttgagggttattataaacccgctgctgtgctcggcctttttgttttctttcgggttatttcctgagggtgtgttccctcaagagggatgactgggtaaagagtgtgaggtttttgttgccagatggctctttagaaaaatggaaccagcctgcagggtatgggcagctctgcgatcccgttcacccacttccccttcaaggccgagttgtgtcatttttatttattttgttttgttactttgtcacactttttttttttttattctgttggccacccccagtgacttggtaccaaagaacagttggctgcttgtaaaactcaaaatcactctggagggaccatgatttagtttcactgacgtcattgaaaagaatgtgcctcggccgggtgcggtggctcacgcctgtaatcccagcactttgggaggccgaggcgggtggatcacgaggtcaagagatcgagaccagcctggccaacatggtgaaaccccgtctctactaaaaatacaaaaattagctgagcatggtggtgcgtgcctgtaatcccagctactcgggaggctgaggcaggagaatcgcttgaacccaggaggcggaggttgcagtgagccgagatcgcgctgctgcacttcaccctggcgacagagttagactccatctcaaaaaaaaaaaaaaaaaaaaattacccctggccgggcaaggtggctcatgcctgtaatcccagcacttcgagaggccgaggcgggcagatcacctgaggtcaggagttggagaccaacctggccaacatggtgaaaccttgtttctactaaaaatacaaaaattagccgggcgtggtggcacatgtcggtaatcccagctacttgtgagaattgcttaaacctgtgaggcagaggttgcagtgagccaagatcgtgccactgcactccagcctgggtgacagagtgagactctgtctcaaaaaaagaaaaaattacccctaagagtgtttcccaaactcacctagtgtccacacagcgtgttcaaatggtcagtcttgcgtatactttatcctacttgttgactgagcactggtgagcatatctgtgaggactcagggctggtggctctccagagctgctgaagtcagagatgtgtgcaggaggcggcgtggctgacatacgggcatcttggtggcagatttgtctagccagggatgtgtgcctgacaacagcatattccagatctccgtaggtagcgttctcaggagtggttaaaagctgggcatccctggaggatggtctgctctgggaactgacttgctccaggatgagctagatgcccggatgccctctcacctttctcagatggccagtgagccaaggttaaatgttaaatgtcaatatgtgcttgggcgtgacctggcccctgtttaatatgggagaacaatgggagtggagggtagaggtttgagatgagaagatagaggttgtgcgttgagaatcattgtatcagcacctcctgagcctacaaaaggatgggattgaaggaaatgagatggcccgagagcagttgtcctcctcgaaggctgccacctgggtgctttcaggcacaagaaagagaaaatcgaagtccagctggagtcagaagggctccacagcagactggcttcgggcgtgtcccaggcagggtccaggtggcatctgcaggatccatcatcctgtctccatgacctgccttgaggtcctccatgtgggttttgcctggtattccagagaattcggggctctccacaccctggagacagtaaggtgggcgcagcagccacagacgagcctctgacccagtggaagcctcctgggctctggttgggcctgtgcttctcgtgaaccaatccttgcatgtgcgcgggggtgggggttgggagagtggttcagtgtgttcattggtttagtcattaggaatgagagtggcagccaggtgtggtggctcacgcctgtaatcccagcactttgcaaggccaaggcgggcaggtcaggaggtcaggagtttgagaccggcctggccaacgtggtgaaaccccgtctctactgaaaatacaaaaaaaatagctggggttggtggcacgagcctataatcccagctattcgggaggctgaggcatgagaatcacttgaacccaggaggcggaggttacattgagccgagatcatgccactgcactctagcctgggcgacagagtgagactccatctcaaaaaaaaaaaaaaaaaaaaggaatgagagtggccaggggatagaggtggtcccctgtcctccatctgccactggagaagtgagcctccttgccttgagctggggtgggcactgactctgaaacccatcgagggctctccagactgaggacctgacccctgggctgagttcagcaccacctgtgatccaggaggaccatttgccaatagttggggcgggtggggccgggggctgccagactccttggtgaagttgctgctcttgctttttgcagattccagacccaggaggagctcaacggtaagtacccctcccttgcccccacctcagcttcgtgcccctaaatctgactccttccctaacagatctgaagttttgagagctgctgggggaagggagagggaggggacggactggccattcccctcccacagtgcccagggtgcaggcccgtcctgcaagttcaggctgagtctgacccaccacagggacctctgtgcacagaggcctcgcctggggcctcagccaggccttggctaaggatggagagccccaccctcatagcagcctccagctcctggctcagcctgccgggaatttccagaagggcctgcacacagtggatttggtttgggccacttttgggtaccaggtctggtcaggaggaagactgtgttcattttccccttttctttactcttccatgaatctcatcctccaagctggatgacagagcaggtggctatggtccattcctttttttttttttccccatctgtcagttcttccattactttcttttaattcaagcattcatacattaagaagggtttctatcctttcatttttcaatataatatacacaaccataatgctagttcagtttcaaattatgggggatcacattcgaatatgcttggatgtgacaagtggctgttacaatactgagaaatttcatgaaagaggtattcaacaatttgtaaggtaatcaaatatgtttttgctgcataggccaatgcattaatagtaacttgttttaaaatgcagtcttttggccggatatgatggctcacacttaaaatcccagcattttgggaggctgaggcaggcggatcacctgaggtcaggagttcgagaccagccttgccaacatagtgaaaccccgtctctactaaaactacaaaaagtatccaggtgtagtggcacacgcctgtagtcccagctactcaggaggctgaggcaggagaatcgcttgagcctgggggacagaggttgcagggagccgagattgcaccactgctctcccagcccgggtaacagagtgagactccatctgaaaaaaaaaaaaaaaaaaggcagtcttttagccttcatattattatgaaagagtattcaagagtatgtattaaggttggtgccatttgccattaaaagtaatggcaaacctggtttaacccttctgataggtagttgtggatgttggggttgagaacagaataatctttgtctggagtgacaccacactctagaatttccactttgaaaaatactcagttctttttttttttttttttttaatttttttagtatttattgatcattcttgggtgtttctcagagagggggatttggcagggtcataggacaatagtggagggaaggtcagcagataaacatgtgaacaaaggtctctggttttcctaggcagagggccctgccgccttctgcagtgtttgtgtccctgggtacttgagattagggagtggtgatgactcttagcgagtgaagaatactcagttctaagctgtggttcctggtagaacaaactttatttttctagctcagcagtgatctggaagctgaggaatctcagcgccttttaaaagttattatgtggttttgttttaaaaagctcctgttttgggaaagtagaatttatgggtataacatatgttcattatttgtacataaaataaaaccatttaaaaagtaaaaaataataataataataatggcaaagacgtgattacttttgcaccaatctaaaagatacgccctctgtgccttgagaatcattgcgtcagcacgggcatccctgcctcctctgaattactcacactcactccattttgaaggcatcaggacatttcatgaggccacttctttgcccttacctgtaaaaatcaaaaactaaactgacactttcctcatgacatagctgtttttttgtttttttttgttttttttttgttttttttttagcatttagaaaatatttattaataatatacatgaatttagattatatagtatagaggtcaccgggcttgtcacttgaactaacagtagtctgtttttagaatgcttgagtgtgatcataaaagactactttccaggatgtcggggctggggagctggaggggctgctccaggaggtgggggacctggagctggtacttacagacttgggtgcttatgagtgtgggttatggaccagatgccagggttcaaatcctagctcagatacttattgatggtataaccctgggccaattactcgactcctctgtgcctcagtttcctcatctgtaaaatggggagtgggctgttacccacctcatacagtggttgtgaggattaacatatgtcaaggactttaggacagggccaacggacgtggcgagcaccctgtgagtcgctgactgttacccctactatttagtacaaattaaaagcaacagacttcacccagaaagctgagaagcccggggcagctcatggcagcttttaaagcagaaagggagactcactggggtctgtagagatgaaaaaaaaaaggggcctcccagttcagagactggtggggaggttgggggtaccctgcagcagcacccattcccgtcccacagcagctgaggagtggtgcgtcggtgacagaacccgtcgcggaagagcgagggttaatgagccagccactgatggagacctgccacagcgtgggggcagcctacctggagagcctgccgctgcaggatgccagcccggccgggggcccctcgtcccccagggaccttcctgagccccgggtgtccacggagcacaccaataacaagattggtgagtcagcctgttttgggaggtcccctgcagcccaggggcagatgggagatgaatacggggccctgggccctggaagggacctggagaccctggagttgaaaggcccaggaaaggagaggcatagattcttcaccccaactgaagtttctgtaagtagggacagcgagggtacttacctcgtaggccattgtgcggattcatgagccagtgtgcatgagatgcctgctgttactcataaaaaacgaacaccaccccagcccccaacaccgagcacccgaggggacaggaggaagacgtgccagtggtcacaggacctgccacttgtctggcgcattccgggcactgtgtaggtgccatctcttcatctctgatggtctcaccaccttctttggatggtgtctttctccccattttacagttggggagaccgtggctcagagggtgaagtgattttccccattgcatggctactaagtggcacagctggaactcgtcccgcatctgctgggccttgaagcccgtggtttgtccacgttaccacccaccctctgcagaagcaggaggacagatggggcccagatgttcagagcttcccaacggcagctgctgccagcctggacagacattggctttggcctcctgtgggcctccctgcctcctctcttgcttctcatcaccttggtacggcattttccccaaaatgtatacctgaccctattgcactcctgccgagaagcctccagcagcttcccattccctatgggatgaattccagcattcttattccagcactcaaggctgacagcaagttgtagctccccgaccagactcacctaccttctgaccccacagtctgtccctccccctcatggcagtctcccaaatttacagacccctctgtcacttctgagcttctcaatgggagctaccccctcgcctgaaatagccaactccactgccttgaatccagttaattctggatatcctggggaccctgcttatttgccccttcctccaggaagccttctgtgccctctccaccatgctatgctccctaagaacccaggcctcccctacccggtgtcctagcacccagtggtgtgactgcgtgtttatagccttcctccacctccacctggctttgtgctccctgtgggcagggccttggtggaccccacctctgtcgcttctggaagggtaactggcactgggataatactgaagagtcatttgtaattgtcctgtgcatttctatggcagacagtggtggccagaactcttcagggcagtcatcttctctttttattttttcagcctcctgagtagctgggattatgggcgagtgtcatcatgcctggctaattttttgtatttttagtagagatggggtttcactctgttggccaggctggtctggaactcctggcctcaaggtgatctgcctgccttggcctcccaaagtactgggattataggcatgagccaccatgcccagcctgggcagtcttttgtaacaaactgaagcttttgaaatggtagcttttagtaagttttatttgaaaagtatgtattttgggaaataccatcaaaggcttcttcagaattcctaagaagtcctaactggaacttctgagtccacactgagtacagtgcctggaatcccaggggtggggttcagagggtgtttgatggggaggagaaggaagtaccaggctcccaggcagctggctcaggtgtgggctgccctcccctggcatggcctgcaggccttgctggtgagtggatcgggggccacctccgccatggtggaaagggaaggccttggaggttctcttgggcacccaagacacaggcaacccccttgtcctcctaatgccagcccagggtagcgttcccccttcccatccagttcccaagaggggtcacactggggtctgtacatcgtccctcttcccctgggaaccaggcaagggaagaacccctttccccccaacttcctcacctgccctccccacatagccaagatgaattccctggactctggagctctggggagggggcaggaaatccatgcagcccttggaagccacccccacagcctggggagtaggcagcctgtgatgggggcagagccagagcggggcagacccctcatggccggctctgaagtttccagacccctctttcacttccgagctcagtgggagctgcttcctcacccagagcagccaattccaccgctttgaatccagttaattccagatttcctggggactcctgcccatttccctgaggaatgtgaggggaccagcctgtccccagctgtggctccttctccctaatccagcacccccaccctcacttccctcccacctgaccccacccgcctctcatcttctctgcccatccccctctgggccttctctcccctcctggggtctcctctctcaccacccccggcccccatcttttgcccagccctctatagggctcctagggctgggagcccacaagcctgatggaggtgtggggagtgctgaggccctgctctgttttggggtctgtgggggcgcccagcccatagcctgtcccgcactctgggccttctcctcttgctgccgtttggcgcacttctctctttcctgggggtgttcaaaaccagaatagaagaaccagcgtcatgcaatagggttgagggtgtgggggactcgagaacctttttggggttcctgaatccgaggggtataactgcattacccagaaaggcaggggtccctgcacccccaccccaccccagctctcaagttccctcttgagcttccccattctggcctccagagtccagcgcagaacagctgggagccagcccaccctgagccagacaccatcagctgggcggaggccaggcttccccactccccagctcctcgggccactgaacctgagcccccatgtcccctctatcagaaggccacaccagaagcccccacatcagactgtggcgaggaccggccctccgtccaagctcccaccatgtgctcacagcacagccatgcacgctgcaggcaggagaccggctgtgagcagtaagccccgaaattcacggcctgagccaggctgtctcaatcatgggctgccgagacctattgagggggccgggttttctgcaggatgtgacaggctggctgagtttgcccggaccgaggggactcccaggacacgggacttgcagtagtagaaccaggaatgttcccgggcaagctggacaagttggtcaccccgggttttggctgcaggcacacagataggagcagaaagggccaccaggcggagtgggtggtttttttttgggggatttctcctaactacgtggcgaccttgggcaggtcatttaacctctccaggcttcagattcttacctgtaaatgggaatcttgatggggtccgccttgcaggagggctggggacccaggagtgggggtgtggaaactgctcagctctgctgtttctgctcgtgctctggttacccacggctttgcctgtttttgtccacagtttgctttctgtcccaccctgtcctcttcttccctacccatccgcagagatgtgctgagaaaatcctaagtacaagtgggctggttcttaactcctcaaggcccagctcctagctgttctatttcctctgagcccccaggatgcctgtaaggtacatcagagaggctgtgccatcagcctgaagccacccggcaggtgtaccagcactgggcctcggcccttctctgcctctttgctcccatcctggctggtgctctggcctccctcgctcacccatccttttgccttgcagagaaaatctacatcatgaaggctgacaccgtgatcgtggggaccgtgaaggctgagctgccggagggccggggcctggcggggccagcagagcccgagttggaggaggagctggaggcggaccataccccccactaccccgagcaggagacagaaccgcctctgggcagctgcagcgatgtcatgctctcagtggaagaggaagggaaagaagaccccttgcccacagctgcctctggaaagtgaggcctgggctgggctggggctaggagggcagcagggtggcctctgggaggccaggatggcactgttggcaccgaggttgggggcagaggcccatctggcctgaactgaggctccagcatctagtggtggaccggccggtcactgcaggggtctggtggtctctgcttgcatccccaacttagctgtcccctgacccagagcctaggggatccggggcttgtacagaagagacagtccaaggggactggatcccagcagtgatgttggttgaggcagcaaacagatggcaggatgggcactgccgagaacagcattggtcccagagccctgggcatcagaccttaaccaccaggcccacagcccagcgagggagaggtcgtgaggccagctcccggggcccctgtaaccctactctcctctctccctggacctcagaggtgacacccattgggcccttccggcatgcccccagttactgtaaatgtggcccccagtgggcatggagccagtgcctgtggttgtttctccagagtcaaaagggaagtcgagggatggggcgtcgtcagctggcactgtctctgctgcagcggccacactgtactctgcactggtgtgagggcccctgcctggactgtgggaccctcctggtgctgcccaccttccctgtcctgtagccccctcggtgggcccagggcctagggcccaggatcaagtcactcatctcagaatgtccccaccaatccccgccacagcaggcgcctcgggtcccagatgtctgcagccctcagcagctgcagaccgcccctcaccaacccagagaacctgctttactttgcccagggacttcctccccatgtgaacatggggaacttcgggccctgcctggagtccttgaccgctctctgtgggccccacccactctgtcctgggaaatgaagaagcatcttccttaggtctgccctgcttgcaaatccactagcaccgaccccaccacctggttccggctctgcacgctttggggtgtggatgtcgagaggcaccacggcctcacccaggcatctgctttactctggaccataggaaacaagaccgtttggaggtttcatcaggattttgggtttttcacatttcacgctaaggagtagtggccctgacttccggtcggctggccagctgactccctagggccttcagacgtgtatgcaaatgagtgatggataaggatgagtcttggagttgcgggcagcctggagactcgtggacttaccgcctggaggcaggcccgggaaggctgctgtttactcatcgggcagccacgtgctctctggaggaagtgatagtttctgaaaccgctcagatgttttggggaaagttggagaagccgtggccttgcgagaggtggttacaccagaacctggacattggccagaagaagcttaagtgggcagacactgtttgcccagtgtttgtgcaaggatggagtgggtgtctctgcatcacccacagccgcagctgtaaggcacgctggaaggcacacgcctgccaggcagggcagtctggcgcccatgatgggagggattgacatgtttcaacaaaataatgcacttccttacctagtggcccttcacacaacttttgaatctctaaaaatccataaaatccttaaagaactgtaaggctgaggacatgatcatcgaaattgagagtatgttattaatagaacccctgagcagaagtggctttgggagtctcccagcagggcagggattcccactgaacccccaggcactaaggtggccagtctctggtagattggatacttctggggccgggagcccacttcctgctggggcagtccttcttgttgctggaagattttccttatcactcgaggcaaattctttctccatgtaattgccgctccctggtccaaaggctgccctttgaggacactcaaagccactgtcggccagttgcggtgcctcacccctgtaatcccagcacactgggaggccgaggcgagtggatcacctgaggtcaggagttcaagactagcctggccaacatggtaaaaccccgtctctgctaaaaatataaaaattagtcgggtgtggtggcgggcacctgtaatcccagctactcaggaggctgaggcaggagaatcgcttgaacctgggaggtggaggttgcagcagtgagccgagatcgtgccactgcactccagcctgggtgacaagaatgagactccgtctcaaaaaaaaaaaaaaaaaaatgccactgttgtcacaaggctccctttaggtattcgaagaaaggtttctgggcctccccatggccttcctccctctgggctgggccgggcagccccatagctttggagaagggattctccaaggaacagcgtgagtgcccaagccctgggaggcagggggaggaccacaggtatctgggatccctgggaggcagggtgaggaccacaggtatctgggagtgttgggcttcagtgtctgagctgggaggagcccagcctgcctccctgggcacagctttgtggcactttagggccagcctccaccccaggcagccagcctgaggcctcctctgactgtctcctgtgcgaggtggagaacacccacagccacagacagaccctgtccaccccatccccaagactccagcccacacccacacatcagcccagccattgaaccagccatgcactcagtccaggagccagggtggatttccccatcctgcccagcgatgagcggaccccttctattctctggctgtgctcacgtccaggttggcagatggacagagctccctgctactcaaggtagcaattctcaggctgtgacgacacccccacacacctcttcctaaacatttgcgatcagagagggacagcaagtggtaagtatcagatggaagctgttgccttcaaagaaaagccattgtttcccaaggcacttttgtaggtggtaaaaaccattctacagttcacagaatctccacggctcgggtcagtccctaaaacggaacgaggggacctccctagagcgtctctcgctccatcacgacctcaccctccaacagtgaggtgtaaaagacccaaggctgggtcttggtcatctttgtcccatggtcactgggcactgattggttgggctaagtagaaatgaaaacctgtgtggggatgagaggcggctctccagccacagttcctcgggtgccttctctcttccccccacttcctcgatcctctgcagtgggggggcaagtgtggggtgggggttgcttgggccagaatatgtggggacatcagattcacagccacggcccaagagaaaagcttagtcaaggcgagactgttcagcttcaaggggggctccttgggctgaaggagaagctgctgaggacacctcaggcccctgcaccctccaccaggcccctctgccaggcacctcctcctaagccagcaccccatgctggccaaacaccctggaacccttgcccctggctgacccaggggagcaggtgttcaatgttggggccatgggtgtgagccaggcacagggcagagaggcttgcctgccattctctgcagctcagacacaacagcagcgtgcggatggtgatggcgctgcggggtcacacacaggctcgaatcccagctctgccatttatcagttgcatgagcttggctatgttccatgatctctttcagactcagttttcttgtctgtgaaatgggggtgtcagtctctacctgacggggttgtggggcttccctgacatgccactcggtgtgtggcttgtgctgagtggcaggttctgtccttattccagcctggtggccgcttgtcaagagcgagcccttcctatgtctgcagaattcagcccatcaaggttaatcagagctttcaggccagcctgggaacctagccacccttggggccaacttgctgtgggaagccccgcagtgggcaggcctcttcttgttctgtgggctaccccaagaacccttcagatcacagtcataggactggctcattattcgacgtctgtaactctgggcatgtcggcgaagtgctgcgggtccctccggagggacatctcactcgtggttctagcacattccagattgcaccacattactgttcgagggctttcctcaattaaagggtctagctgctgaggactagtggggcacagacttgctctcgtgggtcctgtgtctggtggacgggacagacggtggcgtcatcaaatcagtacacaaggtcattccagagtcagatcacgctgtgaaccacaaggagtctgagccaggtactgtggcagagtgggaggggagggccaccactagctaggtggtcagggcaagcctctttgagaaggtgccctttgaacttggcctgagtgatgtcacaagccagcgaggtctggaaggcagggagctgaagtgggcacactcctgcctcgagtttcaggaagaacacagtggtggaagaggcacggtgggcgagggaaaaaaggaggtgaggggggaaggcctggggaggagggcctggtgggccattgtgattaggcacctagattttatcataaaagtactggtctatgtttctttctgttttcttcctagtagaacaataaacatcctggtattatttcagcaatcagtgagaaaggccaaaccaggggcggcaaaggttgttttaacctattttggagggaagttggggaaacaggcagcagctgctggcagccaggaagcagttagatgggttttctcagaaagaactaagacagcattcctggtgatgattgtagctatgggtagggttaggagtctgccggtctagcttccccctttctctgggtatcttccagagagtaaaaaccaaactgaaaaaccctgggaagcctggaggcctttgtttgtgttttggtgtggtgattgttttcccggtcatgaggcagagggatcatttcagtatcacagggtcagcggtggcctgtgctttttaccctttagccctcatggaggcagtggccatttcatgacggtggcatggagctgtggcttccggctcgacaagctcccagctgcttggtcccaagcaaagcccttatgtgcgttcaatgtgggttttctggtctgcaaaatggacctaatggggccaggtgcggtggctcacgcctgcaatcccagcactttgggaggccgaggtgagtgggtcacttgaggtcaggagttcgagaccagcccgggcaacatggcaaaaccccgtctcgactaaaaatacaaaaagtagccaggcatggtggcatatgcctgtgatcccagctacttgggaggctaaggtgggagaattgcttgaacctgggaggcggaggttgcagtgagccgagatcgtgccactgcactccagcctgggtgacagaacgagactctgtcttcaaaaaaaaaaagaaaaggaactataaggctgagagggactgtggaagtccagtctgggcacgtatgccatgttcagtaaatgacagccatcaagagcagcatcttaagagctgagagttcgcctaggccgcattctttgtacatctgggcttcctaatagaaccctggacagtagataggctgggtggcagcactcccttttacaaactgaggctcggggagtgggggggagcgaagcaactggcccactgccacacagctgggaagtcccagagctggagttcaacccccaactttgtgattctaaatccctccccatgcccaggtggcctggctgcctctgtggtcaggggttgtgttcatatcgtggtcatcccctggcactatgccttctagataagtttcctttcatcttcaagtcaccacaactgagagatagaatagaggctgattttattcctccctttatgggaaggcagggacagttgcaagaggcagggtaacctgcccaaggtcaaactccaggctgggtgtggctttctgactgctctgaccggacaggaaggacacagagctaacccagccagggcctccttccttgacacagctttcctcaaaggtgtgtgtgattttttttttctttctttctttctttctttttttttttttttttttgagacagggtcttcctctgtcacccaggctggaatgcagtggcacaaatacagctcactgtagcctcaacttcctgggctcacgtgatcctcctgcttcagcctcccgagtagctgggatcacaggcacgtgccaccatgactggctaatttttttttttctttttttgtagagacaggtctctctatgttgcccaggctggtcttgaattcctgggctcaagcaatcttcctaccttggcttcccaaagtactggattacaggcgtgtgattctgaggtccagggagactcggggctgggttgagtccagggaatctctgggggagaactgcctgagagtggaattgccctttccatccccagtaacacctcatatcctgctcactgccccacctgaggctccctgaaggaagacgatcaagaacaagcctcccattttacagatgggaaaactgagccccatagaggcaaagcagttttcccagggtcccagcttggtgctgtgtgatggagatagctctaactgtagctgtcagttggggctggggtaggggaaagtcactgtctagtccaagggagcagtaaagatgacatgctgattttcattcttcctttaaagaaaaaattgatgttaaaagtaactgtggtgagagggttgggttcttacttacaaggcagctttgcaagagtaaacagagtagacaaaaatatcccatcagctgggcttctgcagcttcacaagctactgatccgtgcagtcagagggccccaggttcagaagggccctgggcttggtttaatgctctgctgtcgccatcttgaaagtgatgaataatttttggcaaggggccctgtgttttcatttttcatggagttctacaaattatgtagctgatcttgcatgggggcagggaaatcgttaattcagaattcacttaatgccaaagcattttacctccattgtcatgtgacctcagagggaccttatagatgagcacacatgtccccatttttaagaagtgttaaatgaccagtaactgatgtaactgttccagtcatctcttgctacataacaaatcacctcaaaacttaatagcttaaaacaatggtcattaattttgctcacaaatctgcaatgtggcctggacttagcaggggaggtgcatctcggctcacatagtaccagcgggggtgatgagatgagctggagaatccacctccaagagggctggcaaattggtactggctgtcagtttctctctgtggagcttcttgggcttcctcacagcatggctgctgggttcctggagccaacaactccgggggcaggaagtagaaactgccagcgtcataaaatttgaccccggaaactggcactgcatcccctttgctgcattccaggtagtcacagagcccagactcaaggggaggggacacagatcccacccctcattaggaggagtgtcaaagaatctcgagatcttatgtgtcagcaggagcacttcacatactgtctcattttagcctctcggtaattttgccattattgtccttggagttggctcaaggaagctacataacctggtggaatcccaagttcctctggctggaatttggatccaagctggtctgtctccagagtgtgagctctggactgagcagctgacctgtgcattcagggacccatacagtcagaatgtggcaggactggaaagcaagctcacatctgtctgattagagaacatctgagcttggtacccatacaaactaggccctatctagtttttagatagggaaatcaaggctctgagaggtcttgccaggcctctcctgaggaagagggcagggtctgggaccttccagggcaggatggggcccccaacttgggttgcacagaaccatgtcaggaagtcacatagagttgtgggtagattatgcaagtacaggctgtcaggagggatgttgtttttcactgcaattacacttcactcaggaaatacagcttctgcacgtactgagggagggttcctcaccctgtgcagaagacctcctggtgaataccggggcactcgctgggtgaccctgggtcctctgggccaagttcatgcatcgaaagttccctgagaagctctttgtgcccatctgggttgggctttgacaatagagttgaagaggctttattcctgccatgcatggagtcacaggttagtaagaaagatgataagagctgtacttgaggctttcgtgtgctctcacttaaacctcacagtgcactaggaagtagttattacattacccctatgttacagatgaggaaaccaacacgcagagtggctaagccagttccccagggtcacacagctgctaagtggcgcagctaggctttgaacccaggccacctggctggagtctgcgtcctcacacacttggccatgctgctccattgtggctcaggccgaggtcaccactgtgctgaggccccagccctgagtcccagaccctgtagaacactgtgcaggcatccatggggctcagtgaatgcacagggaatggaatttgctcttggtttttatcccacctttcctttccaaagcccagctgtggccaggcctctccctcacagaaccttctatgactccctagtgcctacatgccaatgtctgccaatccagctttgctgctacctccacagctcccatatctaaacctctcctgagacccgactgtttccgctcagtcaccaaatacagagggcatatcctcatcatgaaatctctgctcagcgctccaacccctgaatttccaacctcatctttctcctcctcctccaaaaacccttccaggacacccaggcccaggacctccaagctcccacagcactgactgtgaagggggactggaggccaagttctagaagtcttgcaaaaaatatctctgaagaaatgcattcattcattcatacagccactcatttagtcactcaagcaacagatctgtatgtaacacctactatgtgttgggcactgtgcttggcgctggggaacacagtgaagtggggcagtggcggggatatacagtactgctctcagggagtcacagtccaactgggagaccaacctagagtctggtcatggcctagagcatgatatttgctttgatggagagcagcttggggttcatgaccctagtggatggcacctagcccagatggaggcaggtctctgctttcccctctgtagaatgggtttaataagagcacctaccccaaagagatgttgtaaggattaatttcatccattaatttgttcaataaatatttgtcaagctcaaactccgtgctggggtgctggggacacacagccctgccctctgcagagtgacaagaaagagtatttgggataacattggctggtggtaattgctgtaaagaaaaaaagaaagtggtgtgtaggccctcagtgtggtgaggtgtgtagccagggcttggggatgtagcacctgctgtacaaaggtctgggagaatgtagcgattcagggtgtgcagggggaagtgagtagttatgatcatgagtctgtggtagacatcgccccatccttgcatttgcatctctaggtttctacagaagaaagggggcaaggtgatggagagaatttcatgggcggaaattgttctacaggagctggggaggtaggctggcagggctgagccggctacttggtgggaggttgcaacagcctcaggacgggtggaggactgcaggggaactggagcccaagggggtttccttccagggtgaaggggaaaagcaaggctgggcactttgggaacttctcagggaaaccctctcctgtaccctaggggacctgggctccattctggaaaggcagaatacatgacctccatcacgttttgggtctgcactcattaagcacttactagatgccaggcactgtagagtctccatctcagatccttacagcacccctgtaaagcagaggctatttatccccattctacagatgaagaaatggaggctcagggaggtaaagtgatttgtccaaggtcatggttgcgtaccagtcaatggcctgaacagagacttgaacccaggtctaggtgatggcaaagttgatgctatttctccttttgatataccccaactgtctaaagcagcccttttttttgctaggcttcttggtgtttgaaaatttaccactcattcctaggagctaaaggttcctgggttcctccttggggcacatgtctaggagcaggatctcgatctggtggcagaggggcagcagctgctccgtctggcatacagtaggtgctcagtaagtctgcggggcaggcaggacaagcctgggttggaaggaggtccagtttcttgggagtgagagcctcaagaccaacttcacctgaaggacaaatgagaggtggccgaatcactgccagctacttcaagaagcccctaggacactccagccaaggtgccttggtcccttttctaagtcgcctgcccaccctgcccaagctcctgcggggagtgtgcccactgtgactcatccacgcccagccctgcccagctctcactggggcagcagtaggcacacatactcgtaaaagtctgaataagtgaagactgggaaattgcaccagggaaaaactacttatttcttcctcttttgaattggggaggggaaatgttgcgggggaaatgaggtcagtgacgtggtgagcatttcatgctccttactgatgagcagagggccggtatcacgtgctgccttcctagggagggctgggtagtgcgtcaaggaaatgggcccagagctgtgtctcgtccagtctagcaggaaactgcccatctcactgtgtcactcccttctctgtccttgctctaagcctctaccctgactgcccttgctctgagctgaaatctcactaatgagaaaaaaatgtgctggtttatgcctctgtgggctggctgggctggtaggtcccagggggcagcatggcctggaggaaaccgagtgcacggggcaaggatgatgtgcacgagtggtatgtgactcccagggctcacagcctcatgcagcccctccctctgagagtatagatggggaaactgaggcctgagaaggcgagagatgtgcctgaggtcacacagagaatccgtggccctcagcacaagcacccagtttgctggtactttaaagataaaaataaacaaactttataaatggaaaagatgaataaaagaagaaacgaagtataaggaatatgataaatataataaaaattacacacaatcttggcgaggcacagtggctcatgctagtaatcctaacactttgggaggcccagatgggcagatcatttaaggtcaggagttcaagaccagcctggccaacatggtgaaaccccatctctactaaaaatacaaaaattagttgggcatggtg

SEQ ID NO: 155 - DNA, 3622 bp, Homo sapiens
atacgggagaactaaggctgaaacctcggaggaacaaccacttttgaagtgacttcgcggcgtgcgttgggtgcggactaggtggccgcggcgggagtgtgctggagcctgaagtccacgcgcgcggctgagaaccgccgggaccgcacgtgggcgccgcgcgcttcccccgcttcccaggtgggcgccggccgccaggccacctcacgtccggccccggggatgcgcgtcctcctcgccgcgctgggactgctgttcctgggggcgctacgagccttcccacaggatcgacccttcgaggacacctgtcatggaaaccccagccactactatgacaaggctgtcaggaggtgctgttaccgctgccccatggggctgttcccgacacagcagtgcccacagaggcctactgactgcaggaagcagtgtgagcctgactactacctggatgaggccgaccgctgtacagcctgcgtgacttgttctcgagacgacctcgtggagaagacgccgtgtgcatggaactcctcccgtgtctgcgaatgtcgacccggcatgttctgttccacgtctgccgtcaactcctgtgcccgctgcttcttccattctgtctgtccggcagggatgattgtcaagttcccaggcacggcgcagaagaacacggtctgtgagccggcttccccaggggtcagccctgcctgtgccagcccagagaactgcaaggaaccctccagtggcaccatcccccaggccaagcccaccccggtgtccccagcaacctccagtgccagcaccatgcctgtaagagggggcacccgcctcgcccaggaagctgcttctaaactgacgagggctcccgactctccctcctctgtgggaaggcctagttcagatccaggtctgtccccaacacagccatgcccagaggggtctggtgattgcagaaagcagtgtgagcccgactactacctggacgaggccggccgctgcacggcctgcgtgagctgttctcgagatgaccttgtggagaagacgccatgtgcatggaactcctcccgcacctgcgaatgtcgacctggcatgatctgtgccacatcagccaccaactcctgtgcccgctgtgtcccctacccaatctgtgcagcagagacggtcaccaagccccaggatatggctgagaaggacaccacctttgaggcgccacccctggggacccagccggactgcaaccccaccccagagaatggcgaggcgcctgccagcaccagccccactcagagcttgctggtggactcccaggccagtaagacgctgcccatcccaaccagcgctcccgtcgctctctcctccacggggaagcccgttctggatgcagggccagtgctcttctgggtgatcctggtgttggttgtggtggtcggctccagcgccttcctcctgtgccaccggagggcctgcaggaagcgaattcggcagaagctccacctgtgctacccggtccagacctcccagcccaagctagagcttgtggattccagacccaggaggagctcaacgcagctgaggagtggtgcgtcggtgacagaacccgtcgcggaagagcgagggttaatgagccagccactgatggagacctgccacagcgtgggggcagcctacctggagagcctgccgctgcaggatgccagcccggccgggggcccctcgtcccccagggaccttcctgagccccgggtgtccacggagcacaccaataacaagattgagaaaatctacatcatgaaggctgacaccgtgatcgtggggaccgtgaaggctgagctgccggagggccggggcctggcggggccagcagagcccgagttggaggaggagctggaggcggaccataccccccactaccccgagcaggagacagaaccgcctctgggcagctgcagcgatgtcatgctctcagtggaagaggaagggaaagaagaccccttgcccacagctgcctctggaaagtgaggcctgggctgggctggggctaggagggcagcagggtggcctctgggaggccaggatggcactgttggcaccgaggttgggggcagaggcccatctggcctgaactgaggctccagcatctagtggtggaccggccggtcactgcaggggtctggtggtctctgcttgcatccccaacttagctgtcccctgacccagagcctaggggatccggggcttgtacagaagagacagtccaaggggactggatcccagcagtgatgttggttgaggcagcaaacagatggcaggatgggcactgccgagaacagcattggtcccagagccctgggcatcagaccttaaccaccaggcccacagcccagcgagggagaggtcgtgaggccagctcccggggcccctgtaaccctactctcctctctccctggacctcagaggtgacacccattgggcccttccggcatgcccccagttactgtaaatgtggcccccagtgggcatggagccagtgcctgtggttgtttctccagagtcaaaagggaagtcgagggatggggcgtcgtcagctggcactgtctctgctgcagcggccacactgtactctgcactggtgtgagggcccctgcctggactgtgggaccctcctggtgctgcccaccttccctgtcctgtagccccctcggtgggcccagggcctagggcccaggatcaagtcactcatctcagaatgtccccaccaatccccgccacagcaggcgcctcgggtcccagatgtctgcagccctcagcagctgcagaccgcccctcaccaacccagagaacctgctttactttgcccagggacttcctccccatgtgaacatggggaacttcgggccctgcctggagtccttgaccgctctctgtgggccccacccactctgtcctgggaaatgaagaagcatcttccttaggtctgccctgcttgcaaatccactagcaccgaccccaccacctggttccggctctgcacgctttggggtgtggatgtcgagaggcaccacggcctcacccaggcatctgctttactctggaccataggaaacaagaccgtttggaggtttcatcaggattttgggtttttcacatttcacgctaaggagtagtggccctgacttccggtcggctggccagctgactccctagggccttcagacgtgtatgcaaatgagtgatggataaggatgagtcttggagttgcgggcagcctggagactcgtggacttaccgcctggaggcaggcccgggaaggctgctgtttactcatcgggcagccacgtgctctctggaggaagtgatagtttctgaaaccgctcagatgttttggggaaagttggagaagccgtggccttgcgagaggtggttacaccagaacctggacattggccagaagaagcttaagtgggcagacactgtttgcccagtgtttgtgcaaggatggagtgggtgtctctgcatcacccacagccgcagctgtaaggcacgctggaaggcacacgcctgccaggcagggcagtctggcgcccatgatgggagggattgacatgtttcaacaaaataatgcacttcctta

SEQ ID NO: 156 - protein, 595 aa, Homo sapiens
MRVLLAALGLLFLGALRAFPQDRPFEDTCHGNPSHYYDKAVRRCCYRCPMGLFPTQQCPQRPTDCRKQCEPDYYLDEADRCTACVTCSRDDLVEKTPCAWNSSRVCECRPGMFCSTSAVNSCARCFFHSVCPAGMIVKFPGTAQKNTVCEPASPGVSPACASPENCKEPSSGTIPQAKPTPVSPATSSASTMPVRGGTRLAQEAASKLTRAPDSPSSVGRPSSDPGLSPTQPCPEGSGDCRKQCEPDYYLDEAGRCTACVSCSRDDLVEKTPCAWNSSRTCECRPGMICATSATNSCARCVPYPICAAETVTKPQDMAEKDTTFEAPPLGTQPDCNPTPENGEAPASTSPTQSLLVDSQASKTLPIPTSAPVALSSTGKPVLDAGPVLFWVILVLVVVVGSSAFLLCHRRACRKRIRQKLHLCYPVQTSQPKLELVDSRPRRSSTQLRSGASVTEPVAEERGLMSQPLMETCHSVGAAYLESLPLQDASPAGGPSSPRDLPEPRVSTEHTNNKIEKIYIMKADTVIVGTVKAELPEGRGLAGPAEPELEEELEADHTPHYPEQETEPPLGSCSDVMLSVEEEGKEDPLPTAASGK

SEQ ID NO: 157 - DNA, 62169 bp, Mus musculus
  misc_feature (1)...(62169): n = A,T,C or G
tggttttgttttgtttttaattcgcttccagtgtattaaaactgggctgagagagcattactcagtgtccttcagctattccagaattctccagctaagatgtttgtccttcagcctcttggtgttgaatgtaagaatggaaagcataaatatccctagaagtgaagtaaacatcttataagatctgttgaaaggaaatggcatatgttggtattctcggttgattggcaatgcatgtatagagtagctaatgtgcagagttagtacttgggcaataaaggggttaatttgactaaatcagtgagtactgagcactaaatcagtgagcactgagcactaaatcagtgagcactgagcactaaatcagtgagtacactgtttattataggcagaatcagggcatccttttctcgtgtccataagctgattttccacacaggatcattctctcactcaacccacagtccacctggggttccacttccaaagtcaagctataggagttgctcgaatttaaagcacacactagggatggactgggtgataggctcggaagtgggctcaaaggcaacgctagggttttaattactacaatgaggcgccaggtgtgcgcatggatgtgtgacagtgttctgctgcaaggtgatagatacagtgaggaagaacagacacctatgtccatcctacaggcttgaatcccagtacccattctctaccagtgactagtaagccagtctttctctcacagtagtctgggtcacatgtacagcctgtgttttgaactcgttatagatctgaatgagctaacatttataaagcttctgttctcaacatttttttttcttgtgggagtaatgggcttcccaaacttgggcctgggatgaatttcccttcctccgtctttctcagttcagcaagcaacctctctatcaacccgtctgctcacatcatcgctatcctccccactgcgcaagcccagatcacagcggctgcctctgacgctaaatatctcttttagcagcccgtcctagtagctacacccagggtttaatcttatctgccgctgctaacccatttcaaaacaccatcatctctggtctggatccaaatgccacagactcttaaatgatcttgctagctgcttctacttctggggtcctttctattgcttttcagcaagggctctaataaaattcaagcccgtaggtgtaactttcttatatatgtgtctgcttggcacccactgccaacacacagtcagcagcattcctgttcatacacacatgcacgcacctggagcctcactgtagcagctaaaatcccagagttacctttgaccacagatctgagcctatcgctcagcccctgcgcttttcttctggaatcctggcaccagggtcctctagttgccctttgacgctccttgaacatatctggcttactcctgccttaagtgagacctttcacctgctctgtctgtgttatgtggctacctcactttcagataataaccttccccatgagaccctcctcagtccgctaggcccatagcaatcttccaattccagatccatgccctgtttaattggtcttctggccccccagcactgttccacctgtgtaatggattacttaatgagtatgtctattccatgtctgcttctattagactgcaggactatttttagttcttggatacctgctacttataacagctcattgttgcgagctgacctgcggctcacaagaaacggggtacacccgggaggcagactggagctgaaagagagagaaatagacggtcgagagaaaaatggagctaagtcaaggttcctgatcaaagctcaaatgtaaatagtaaatgtgattataaaggggtggggggcattcccaccaatccattcttggtgcctggaaccagctgcaggtgtagtctctggaatatctcaggggcctctcagcaggtagcaacgtcttgaaagagaacagcaacaatagagccatctaggtaggaaggctccaccctaggtattctccttagtggcagcaaggtcaaagtctggatcagcctgcttcgaggctgggggaggctacatgtcataagttaaactctcaataaacatttaatgagtaagtggatgattgaggaaatataagaaaaaaaattgccgtgatgtatgatatttgacttagatttatggtctagtactcagcccaatgccaggaactaggtgttgagaaagggcttcctcctataggcattgcctggtgccagcctcatgctgcatattgtctaggtactgggggcataatgtacttgtgatagttgatgaaccaaggcaagcagtgtactgtcctagaggaggagagctgcaggggcaggatggaggagaggctccacccattcctggagacttgacccaggaggaggtatatgtgcagcaagcctgggaagggaaaagattacataaggagggcactcatgttcaaggagctcctgaagagtgagtctgggttcttgtgtcacagagaggagatgggccccgtcatttccttcctttccttcttccaacccctcctaccaccatcccaccccactctgtcccagattcatagcctctttcttcttcttcttcttcttcttcttcttcttcttcttcttcttcttcttnnnnnnnnnnnnnnnnnnnnnnnnnnnnnnnnnnnnnnnnnnnnnnnnnnnnnnnnnnnnnnnnnnnnnnnnnnnnnnnnnnnnnnnnnnnnnnnnnnnnnnnnnnnnnnnnnnnnnnnnnnnnnnnnnnnnnnnnnnnnnnnnnnnnnnnnnnnnnnnnnnnnnnnnnnnnnnnnnnnnnnnnnnnnnnnnnnnnnnnnnnnnnnnnnnacacacacacacacacacacacacaaatatatataagtacaacctgctgagatggtttagtgttccttgtatgtatgatttcaagctgatcgatttatattgtagagccaggtaggggttcctccctggggaaaattaacttgccctctcccagcagttattagctgcctgtagctttgtctaagggtagatccccatgagatttcttccttccatatctcgtctatcagtgttgtcgttgttcaggtcttgtttaggcggccatattgttacagtatcataagtatttgcttccctgtgatttctaagagacacaatttcataacagacttaacagcccttgggcttcataactacctttgaacctaccaaagattaaacaacaacaacaacaacaacaacaacaacaacaacaacaaggctaaacagaaagatataaaaaatgttaacaggaattgtgtatgggccattctagaagcacccccagatccacaagattgcttaaggctgtgtttgaacacccatctctttcgtctacataccttgcttgttatttacaccctaatgtagtaccctgtcttctctaagcctttcttaaagctgctcagacctactggcatccctctggtcagacatgtagctgctgctactatctgagctcacttttcaaacttgtgttggagggagtccctagcaaaggaattctacaaagcccaaagattcctttaatttcattgtacagaagaggaatgtgtgcttcagagcagactcatgctcttttggaaaggccaagccctcctacctggccacaaagcctatgcttttcactgtgtgtcccaagatcaaggcccctttatttctgtgctctcggcacctaacatagtggcttgcacatggtgggtcctcaatatctgtcaaataaatgaacaaatgaatcaaagctatcatgcactatgctttgtgtctcagtatgttaactgtgtcccaatacgtccataatcacaggactgtgtccattttaggtgtgtagctttctctcgtgtcagcctcacttttgtctgattagacatcgcatgtcaactatttctcaaaagaaaggcgtagggaaccagccccctagtcatatcgtagcagtatgctctgtttgaaagagatgagcagttgatgtagttttcttctctaagaatatatcaatctcagatatggtagctgggcatcttttagaaaaataaaatgcaaatggagagagctcacaaaccaagtgactgcagaagtcaaaggtggcaggcttcgttttggattcattttctgtgtttgttatatttatcagaaataggaacaaaaagcccaagtttcctcaactcactgaagattaataacaagaaatgaagacagcaaaaagagcaggtttactcatgtgaatgccaggaaatccagtctagatatcatgccacttggtacaatgttacaatgtttttggctggtgatatctttccaaggtaatcaggtaaccaataggacatggcatgctataatgaagatctgtctatgtatgtgtggatgcatgtgtatatgattatatacaagtaaatatgtatatatgtaaatgtgtgtcttatttgttcattaacataagaggaaaccagcgaaggaaaaagtcattttttatgtttaccagtttgctccatgtgtattgatcatatttattgtcaaaagcaaatacatagggctagatagaatagtgcttgaaagaatctgaatttcgtaccagatcctaccatgggtggctcacaacctcttttaacttcagcttcagagaatctaatgctctcttcttaacctccgggggctcttgaacacaccttgtacatataaacctacataggctcacacacatacagataaacaaaaagtgaacatgtctttgaaaaagttaacaatactcttttaaaagggatggttgggggagagagtgaggctcgttacacagtaattgtatttgaactttgcccttacagataacatgaaaagaaacaccgggcaaaggggtaaaagaaagtgggagaacagcacagggtcagagataagggaggcaaacttgaggcaaagtaggagcagcacttcatgctccattttcaaatctatagttcagatgtgacatgtgtaaccctccactcatcggaaagtctagataccgggagtaaactgggggagctgtgcatctattcgcctaacaggcacttaaggactttatgttaaatttcagaatacaaagaggaaaaaaaatcaactgttaccaaccacaccctaagcaaatactcggccttatgagaaggaagcctagaagacgttctgcaaagttgtgtttggtggctaggtagttcattcccaagcctgtgagatctgccttgtctcaggacatctgctggcatctgtagtgttcagccacgagagggtacaacttgaaggcctgctgtgacggttaatatcgactctggaatcatctaggagacatgtcattggcatgttttcggaagatttttctagattgagctagttgaagtagaaagactaatcataagtaaggataatatggataaatatcccaaccattctatcatttgggaaccctagtctaaataaaaagaatgtgaactgaacgatagttttcattgctctaagcttcctgaccaaagaccagctctctcatgctccctccatatcgcctctgccacggtggacaagactaatgttgagtttgacctgtgaagtcacggaaggataaatgtcctgggctcttataatcctgcagtcccattagaatcatggcagcaataacttgtgtcttttcactgttttttatctttcttttgtgctggaggatttaggagccatggtctattatttaaatctatccttgctcaaatttcagtttggtgtttacccagtgttaaggataacaggacttcatgacaactcccataattcttaggtctaagccctaaacttcatgtctcaaaaggcagctgtattagaagatagcccagttacctgtatagaataattaaactgagaccatggagggagggaaggctcaaatccatcacctggtggtttcatacaaactggaaattagatcgcagactgttacagacatacctgctcagcgaataaagacgaagagaagggcagactgaaagccgagtggacaggcctcagaacgagccacccatgcagaaaccttgatcctgaacatccagtagtgcaagacaatacatttcttttgcttaagacacccagtgtgtgtgatactgtgctatggcatctccaacagactggctgactgagcttagacctttgtccattttcttttgttgttgttgttttgttttgttttttgtttttgtctaggcagtgggtgtggttgcacaaacgggggtggggttgggggtggggcgggagggggcggggttcactaactggcctttctttgaacttttaaccatttaatgacaccctgaagacttgtctactccccagcctgactagtagtctccatcagtgttccaaacagttcctcacaggagtgttctctttctacttcatgaaagaagcaatcaggagacaacttccttgtcaaaacccccacccttgcatattctccacctctttttgtaaggagctggagcttcagcccacatccccaccgtgcctcagcttcctctccccatctcctgcatttgtcaagtgttactgtgtgagtcatcttgtcagcctccaaaagtcctgtgagaagtctggtctcagaacaggatgctgtttcctgactcccaggctattgttactttctcattgttgaggaaaaaatatccaacgtgacaactgaaaagaaggaaatttcactttggttcaggttttagaggatttggtccatggtctcttggcttcatggtttttttgtttgtttgtttgttttggttttttttggtttttgtttttggtttttcaagacagggtttctctgtgtagccctgactgtcctagaactcactttgtagaccaggctggcctcgaactcagaaatccgcctgcctctgcctcccgagtgctgggattaaaggcatgcgccaccacgcccggcaacttcatgcttttggtagagcattatatggcatagaggaatagttcacatcatgaccaaccagaaggcagagaactggacaggaagttgtcagggatagcacagtacagcatcaaagacttttaacgagtaacccaagtcctccatcttggcccatcctcctaaattcataaaccttctaaaatagttccccaacctgaggtccaagagttctaaaatcatgatcctatagagaattttacatatccacatcataatgcccagcatcttccaattgcatccttatttctctgttccttttgacactaagcaaacaaacaaacaaacaaacaaaatggctccctttttcaacacaactgcaccctaacttactaagagaaccttcaaaccttcacttgaacctgcctgctggactgtgtccttctcattccctgaaaatctgaaaatgttccctctcgagaacggaaagaagcgtttaagactttgctgttcttgcagaaaactggacttaggccctagcatccgcatcaggcagcttacagccatttacgacttcaattctgagggacctgatgccctattttggcccatatggccatcccacataagagcctacacatacatgtgcaaataatatgttttttttaattaattaattaattttttgttagttaagaacttctttctttttcatgagtcacccttccaagtttcctttgctgggattttcacacttttctgactcttacgtcaagaatgttccccaaggttttaaaacttctccattccatctgttacatagtctctctgtgacatgacgaccctctttacaaactgtgctgaaacttcatgtgccaggtcatttaaggtcactgatcttaaacaggttaaaacagaattctgtgctgataaaatggcctgacctggttcagtcttctctgctgtcagacctgatgaccccagtttaatgccttggacacacatggcagnnnnnnnnnnnnnnnnnnnnccccagtttaatgccttggacacacatggcagagagagagaaaggacccctcaaaggtgtccttggtcctccattcatgtcctgtggcatatattcacacacacacacacacacacacacacacacacacacacacacacagagagagagagagagacagagagagagagagagagagagagagagagagaaccaaagaactgcaggaacaaaaatgaaggtccagttaacaggcccagctcaaggggaggctccaaggcctgacattattactgatgctatggagtgcttacaaacaagggcctaacatgactgcctttcgaaaggcccaacaagcagctgaatgagtccgatgcagatatttacacccaatcaatgcacagaagctggtgacccctgtggttaaattagggaaaagctagaagaagctgaggaggagggcaaccctataagaacagcagtctcaactaacctggaccttcgagaccactcagacactgagccaccaaccaggcagcacacaccagctgatatgaggtccctaacacatatacagcagaagagtgctgggtctggactcagtcagagaagatgcacctaaccctctagatacttggggccccagggagtgaggaagtctggtggggtggggggtagggataggggtggggacatcctcttggagagggggtggggaaggaggaaggtgagggaatgtaccaggagggagatgaagtctggactgtaaaaaaagattaaagaatgtatttttaaaaaagaaaaagaaaacacaggaaaaaaaagaaagagagggagagaggcacacaaaatgaataagcaaaatgacagcaaacgtttaaaaaaaaatgaaatgcacagtctaaaaaagtcctcctgacatacggagctgcagagacttactctcctgctgccttcggaaggattctctgtcatcctgtagtatagctgcaatgctgctttcccgcatcttaaaacagaacaaggggctttcctgccccagctcttgcatccagtaccctctgcctgaaaagtgtcccgtgaaaatcctgtgtcatgatccattctgtgacaagtctctgtttaagcagaagagtgcggggtcttcttgggaaggagagccaggaagagcctttgtatttggggttcccatgtgggatgaagtattactgcacatgagatgggttgcgagcatcctatcaactctaaaatcctacctttgtcaaccccctagagtaagcagcaataacttacatttattgagtaatcggttgttatgtcttagggattatgctaaacacctaggaggtattaagccatctaatcaaagcaagctttgatgtaatgaatgtgaggctctgctcacatctatctagttcagagaggtaagtttatcttaacagcactttaccatctggggctgggtttgaactgatacctcctgagaagaggggcagagtaaagctgagactttaaagatacttgggcaggatttttatcaaagctcagaagtagaggtaagcaggccattcattgccaggcatttgggtgaacagagagagagagggagggaggagagggagagggagaataattttacacacacacatacacacacacctgagcataagtagcaaacatgtcaagtgtcaaggttgttggtcaggagtattctgaagctgttgtttgtgtaccagcagaggctaaagtgctgtcttctcttggagagagaggttctggtcagtttgctctggagtctggaagtaagcagttggagtgcctgttgacaacccaagagccttattagtccagtcacctccgtggaactttggagcaggagtagggggtgggaaaggaagcagataaaagcaagtgaaaaaaaggaggaggggcaggctctgacccagtcagccctgtgctctcttcctgcctagcctgggccagtcttcgggagcccaatggctaactatgaatttagccaggtgtctggggacagacctggctgccgcctctctaggaaagcccagatcggtctcggagtgggtctcctggtcctgatcgccttggtagtagggatcgtggtcatacttctgaggccgcgctcactcctggtgtggactggagagcctaccacgaagcacttttctgacatcttcctgggacgctgcctcatctacactcagatcctccggccggagatgaggtgagttggcttctgaggctcactctaggcacagtgcgcagcgggacaccggggaagcaggctgtgactcagctggagctctcgcggcgggggggaatcttccagattgtcccaaacaaagaatcttgtgttgtggatcagctggaagccgaagggcagtgctgagcggaaggtctcctgttcaagttaccagaacaccgcctgcacaatgcctcctccgttttggcagtgtctgtgatgggggcgccgatccttgctgagctctgcaaagatgctcgcttcccacagagggtcctgaactctgaaggaacccttagggctatctttggccacagccatgcttctgggacaaagattactctcaggcacaggaacttcacattgtcttttggcttgtggtttccatcagacaccgcccctgcccagaaagttaaggtcacaggcgacatttaactaggtggcttgctcagcttgctgtgggggtggaaggggccaggaggatttttgtgaattcaaggttaacaagggctgcacagcaacattgtaaattccaggacaagcttgggttacaaagagagacctgactcaaaataagttaattaattttaattaattacaacacaaagaaaacaaaaaacaagcccaaacagcatcctggtctttttttttttttgcacctgatcattaataaaaacaaaacaagacagactgtcaaaactgaaatattactcatcaggtaagcgaaatccacttggtgatcctgtgtagacccttgggaacatcatcttcattggtcaatagagtcagcccatagaaccccttccacccactacctgccccagagggaatgatttatgttgcttctccctggcatcattttaacgtagaactgatttctgaagtcaaacagaaagcccagcaggctgggaaggcacacgcagaaacccaacttcacattctgtcttcagatgcacacacttcccgggtgctcgaatgctcagtggtttgggtcctggtcttacttgaaaatgttggagtataaacactctcagggtcctgataaatattttgtttacagatgtttaaatgatattggttgttcagccattttgatagcttgtaaattttctgtgcttagcaaaccagatgcatggcactggcatgatgtgtgcttagcattaaccatgtggtgtagacggtaagcacttcttcaacctatccactcatgtgtatatgtgtgcattcagcaagaattaattatttgtgtttatcaaataataatcaatctaaaaataacaggattaactaataaaagtatatatatttactctgtgtgtgtacatgtgtgtgtgtgtgtgcacacacgctcgtaagtgcgtgagtgcctgttccacagtacacgtgcagaaatcatggaattcagttctttgcttccactctgtagcttctgggaatcaaattcagataattagaggtttggaagcaagcatccctacctgctagtctgtatcatttgcctaacatattactattgtgatgagcatcttttcagacatctcacacacacacacacacacacacacacacacacacacacacacacacactttatatgaatagattagtggcaggtacatctcatgtgtcaggcacttatgtcaggagctgaggtgcagctcagtgatagagctctggcctggtttacaaagtgccctgggttcaccctcagcatcgcagtagaggaatgagtggaacagaatcaaccaggacagaaggcaacgatacatagacggttgctattgatatctccattttatagataagaaaagggagtcaaaagctgaaccctgttgagccctgaagccagatcattggagctggaatcttggctctgttgcgacctcagaccccgccctcagtgtatctgcgctgtggtgtgttcccaccttgtaaaatgggaacgttaatggcagcactcggcatctagagtaaacgaagaggactaagatgaataatcttgtcatggtaaatgctcaaaatgttactgctgtgtaaatggagtgttgcagatacctctccacaatagcaaatataaaataagtacaggcgttcatgcattagaacattgttgtataattcagtcctccagtgctgaaagttacatcgtttcgaatcttgttcacctaacacttggtggtgatagggtctctcatattgctacacccaaatctaccttattttttatagcgtagatgtaaccatttccagtcatcaaaaatttaatttccaattttaaattacatatctctgttacatttaggggatgggaggattgccatagggcatgcatggaagttggttctttcttcccctatgtaggttctgggaatcaaactcaggtctttaggcttggcagcaatcacctttatttaaatgagacatcgtgctggcccattttctaatttttcaatcccattcattcattcattagatatttttgagcctctgctgggttccaggtgggtgatctggctactggtggcacaggaggggtagtgtcctgattcttgtccagctttcccttacagtaaacatcttcaacttataccttcatgtgtgcactggagcgttctgtatgacagactcccactgatagaatgagattgtacatgttttagttagggtttctattgctatgaagagataccacgagcacagcatatcttgtaaatgaaaatatttaattggggctgacttacagttcagaagttttagttcattatcatgatgatggcatacaggcagacatagtgatggagaaggagctgagagttctacatctggactgacatacaacaggaagacagacagacacttggcctgccttgagcatctaaaaaccacaaagcccactcacacacttcctccaataaggccacgcctactccaacaagaccacacctcctaatagtaccactctctatggacctttgggggccattttcactcaggtcaccacagtgcatattttgtttgagtggctttcaaattgcacatgtttctaaatcctctgtgaaatagttttattagttatttattaactctcatatcagtctacagggcccacttctccatgatatgaccattattaaatgtcttaaatctttttaaattatgagaaagatggaaagataacatataaccattccctgtttgccagcaagtcttctgtctggcttttgtccatttaaactttgttcagatcttcactctttctgttgagttaattacatatgtgattttgggttgttcatattctagataatatttatacacacagacacaaagtatctcacagctacatcactaaggcctccaccccaaggacacattttactgacaacaccctgagtttcattattatattggggctacttcttattttgatacccttactaagaagcaccgagaaagccagttttattttcaaacctagtgcactggaaatgtttactctctgttctgcactatgaatcaggaattctttcctctctgggtctgcactttctcttgcacagctagaaagcaaagaagcgaccctcagcttctgcactaagagtttgagccacagctttgggttcctagggggagttatgcatcttccctttggcagttgacaagagttacatcttacatcacttctgcaaggggctgtgtttcttccagcctccaatgaccacttcctgtgtgtccatcaagtcagcacgaacagtccctccttgaggcctttgttcttctgcctgacacccaggtctgtactgatgtcacaggggtctccacacaaattgaaatagcatgtgtgtgtgtgtgtgtgtgtgtaggtgttggaacaggtttgtgcactcattgatgctggcaatccaaaacagaaaacaaataagcaaacaaacaaacaaacaaacaaaactcaaaaccctgcagtctaagccaacatgcagctttagtctgaaggaagtgtgacaggattcccttccttcctggaactatagacttttccttaaggcttgaaacaatgcggcccactcacaattatggagggtgctggccttcctaccaggcctatgatctaatgttattttcatgtcctagaacatcttccagcatcaggtagatatttctgagcacatatctgtgtgctgttgcctcatgaagatgatactgccaacgactcatctgtttatatatatatatatattttttttttccgagacagggtttctctgtatagccctggctgtcctggaactcactttgtaaaccaggctggcctcaaactcagaaatcgcttgcctctgcctcccaagtgctgggattaaaggcgtttgccaccacacccagctaagatttttttttaatgctgaatcttgttgctgggtaccattttctaagtctctataacaaactactactgcccagttcagtaatttgcattgaggatcatctaggttgtgtgattctgcaattggacaggggtcgtttggaggccaacttgactccatgtcatctgggtctgccatcacccaggccatcgttcaacatgccatgctttcatgaatgacatcttggcttagcagagaagttgtgtgtctctttctctttgtattgcctctgcatggtcccctccacaaggtccttccctattagaccagggactcttcatggttttcacactctaatagtgcattcagctgggtcctcctaaaactttaggctcatgagggcttcacctctacaggtcaccaagccaaggccaactcagactcaacagctagagaaactctacttctcaatgggtgggaggcataagacattttgtgggtaccctcagctcttcatgttttgcatgggagcatccttgtttatgttcctacaagccttttgttataattgttctgttgcctctgttattgcccttaacaacttcccagaactagatttataatgaaaaaaaattgcatgcaatttatgttgctgagtttgaggatcattttatagtggtgtgatggtttatatagccttggaccagggagtggcaccatctgaaggtgtggccttgttggaataggtgtgacctggttagaatgggtgtgtcactgtgggtgtgggtataagatcctcaccctagttgcctggaagtcagtcttccactagcagcctttgcatgaagacatagaactctcagttcctcctgcaccatgcctgcctggatactgacatgctcccaccttgatgataatggactgaacctctgaacctgtaagccatccccaattaaatgttgttttttataagacttgccttggtcatggtgtttgttcacagcagtaaaaccgtaactaagacaagtggtatatatttagcactcagattaatgcttaaactataataagttctaaatatttagttgaatcacataaatagcatatgagcatatatatatatatgtatatataaaacaaataatgtaaacaaagccataataaatataccttcccaggattaccacatttaaatctatcaatctgtgtttaagttatttagactttgtgtgtgtgggggtggggtggtggtagtttctttataagctgtataattttgtggggggaggggcaaggatgcagttgctgtaaccaaggcaacttatgaaagaaagcaattaatttgggacttgtcttttttcttagttagggttgtgaagagacaatacaacgacagcaactcttacaaaggaaaggtttaattagggctgacttacaggttcagaggtttagtccatttagtcatggtgagaagcatagagacatggtgctagagcagcagctgacccacaggtagaagggggagggggctggcatggaattttggaacaacaatcctgaagacacacattttccaacaaggccacaccttcaacaaggctacacccccaatcctttccaaaaggttcatcaactggatcctaaggggtccatttgcatccaagccaccacagggatcacaggtttagaggcttagagtccatgatcatcatggtgaggttcatggtagcaggaatgtaggcatggtgctggagcagtagctgagagctcacatctttagacacaaccattaggtagagagaaaaagaacattggtaattgactaagtttttttttttttttaagttcttccaacaaggccacccatcttaatccttttcaaacagttctaccgaggaccaagtattcaaacatacaattctatggaggccattctcattcaaactaccacaaacttgcttaataggcaagattaactagccggtgagccttggggatctacctgtctctgccttcctagcccatgcatgccaccgtactaggatttttaacaggagttctggaaatagaactcgggtctttatgcttgcaaggtcagtactttaccagtggagccatcttctcaacactgcagatcttattatttattttttttaagatttatttatttattatgtatatagcattctgcatgcatatgtgtctgcaggccagaagagggcaccagatctcattatagatggttatgagccaccatgtggttgctgggaattgaactcagaacctctggaagaccagccagtgctcttaacctctgagccatctctccagcccttgcagatcttatttttaaaacttaccctcataaaactcatctgctggcctctcttttgctttctgtgctgggtgtcagggttaatttacactgtcaacttgatcgtatttaggattatttatagcataagtgagatgcacctttaactttcttttgcagaatttctaaagagctttaactaagaaggaagattaatctaaacacggggtgggggcaccaacctgtgagctgggatcctgggctagacaaaaattggggagggaggaaaaaacagtcatgtattggcattttccgtcctctcactgtacttcttggacagggtgacagattaagtcacttctgtcgccatgctttctccgtcatggtggattgtgagccaaaatagacccttcatttctttcttcctcccctcccccccttaaattggtttatatgaactgtgatggttaatattgactatcaacttgatagggtctggaatcacctaggagacaaatctctgggcatgtctatgaggaagttttcagattgggttcatcaaagtaggaagactcaacataagtgtgcatagtatcgttccaagaactttggttttggctgagtaaaaaggagaaatgcaggcaagtagccacattaatctctctctctctctctctctctctctctctctctcctgcttttgccaccttggcagactgtgactcaaactgtgagctataagaaagctttccctttaaatatggcttttgttcagtgttttcgaagggaaagaaacatcagttatttgttctcagtgacaagaacagctactaacatgtggggtttgaacctggggtcttggctgagccacactccctgtctcattcgaagatggatatcaagcttttccttgaagatgaaactcaactctcttaagttgaaccagcagcattaaatgtagaatactcctgaattaacgcccttgtttcctcagtcttgaaggctacatttacaagctatcttctgactaagacagccctagatatgctgagagacacacatccaagatttaccacagggtgtacaggatgtcagcacttacagtatctcttggctctgtgggaaagtgtgacactcaggactcagggtatgtgcagaggtagaagagggtctgagggtgagacagagatcaagccatgaaggaagatgggtctctagagagaggtctggttggtatgacttaagttccgtgactctcccatcttggtgaagatcagcttcctctatagatgatggggatttcagccatggatgtgagttacagatgctggaggtccagctgagagtacagagatataaacaagtatgtacatgaaagatctcttcatcccagccacaggagatgttgacagccagagaggaggggttctaattcacctcaccacccttagttaactcatatgctgttcatcatattctggtctctttgttgaaaaaaaaaaagctttttgaatggaacacacttatgttaatataaaggtggctggacccaaatgtaaatgatgaaagagtcagagaatagtctctattcttccgcttcacttctttctcacattggctggattttctgatccctttgttttcaggttacatgtttttaaaattctcctttgcttcttcctcttcaaactttctgggtattttaggaggtcaagtctgttcattttacttccttctgactcctactttgatagtctcagcattttacttgagacttgatgaaagcagaaaattcgtacagagagtaaagacttcccgatgttggatggaactggcaaaccagtgaactcaaataaacccgttccctttacataagatcatgtcaggcatttcatgatagtgacagaaaactgattaatcaggaacaaggatagaacaactgccagattcaacagcctggctcaccagaatttgaaaacatttttttccaagtctaagttttcataagctaagcgcacatagcacgtagacctacacatattggagatttatttattcatttgtgtcaggcttgaaagtgaccagatgaaatgtaactagaacagactcgaagcccgagagactagctttaaataattgtttatgaggatgtcagtaaagtgataaattcacttcaaaaatatttcgaggcacttgtatctgctggtactcaaaatgaatattagacttagatacattgacatgaactagttaacgttctatgaagagggcagtatgaagctgaaattttctgattgtgttgttattgcttagaaattatttgtatctctagcagacaaaaatgacacactatcctctaccttaaaaggttggagctataacctcagacgaaaaggaatgaaaaccatattctactgagtaaatttttttttgtaaatcttcccaacagtacctgccttagtctgttgctattcgtataataaagtacaagatgttggaaaatagatgaaggaaaaacaagtttagctcacaatttcagaagttcaagaaacttctggctccatcatagtatggcaggtggtagcaggatgctgagacctgtgaggagagcacttagacacaggaactaactcccaccttcagaataggactctgagagtgatgacaccttccattaggtcccaccattaaagatcctataacacccacctacatggtaggccaagcacaagcatggaaaacgttggggtatagacacagaccatatccaagctatgataacatctcagtatgacgctacacagaatgttgtctatggtgtgggtttaatttgggcccccttcaatgttttatgtattttgtaacatatttattcaggaatactatgtattcctatgtacctatagggagttgctcttaggaagcccaggactcccaggaaactgccaaaatttgtgtggttaattcttctaaaaaaaaaatcctgagttatttgcgtataatctttactttgtcattcatattttatatcttctctgtatttcttaaaatagataatatagcatacatgctacataaattgctattacatcatgtagtccagagaatgatagcaacttattctgaatattttcaatatgcagtggtttggactcacagatgtggcagccacatgcacaggggaccaactgtatgcctggcctcttgcaggtgggttctttcttaacagtgagcaaaacacacagaatccttctaatttcagcaacttgcattctctcaggccaaggaaaatatgaaacaaaacaagaacatatgctgtatagcaaatggtgggaagagctggggagaatgtggaagagggtttcaatcttcaattatgggagtaaaatgagaacaacttccctgcaaggtgacattttagtaatgtctagcctgtgtttgatcttccaggactttcctaaagacatattataactttggttagttctaatgtagagtcatattttacactgtaaagatgtatagtatgttttctttaacttattaccattttctctctatttacagatacctattagtatgtggaacagggtggctatttggcttaggattgcccaccgtctgatttggatggttacagtcttgtggtgctgtttatttttatgctttgatgagttgatttattactatgagatgtacgtgtatgatgtgtgtgagtgcccatgtacacggatacatacgtgtcatggcgcacgtgcagaggtcagttttcttctctgaccttcatgcggggtccatggaacagactcaggttgccaggcttggacagacagtgcctgacctgctgcttcctctcgctggcctctgtgctgctgtttaacatgctcctacagaagcagtgttccctagaaactgacagcctggttacagtagactagacttggggatggagcagggatacctcacagggggagctattcttccagcattacatcaaacgccccataatgtcacatggtcccacaacttgaaggttattagagttgagcactgcgtgcttgggacatctgttgttaagttccgcagtgacatttcatcccactagtttagcagcagttgatgatcctggacagcccttcttttttctttttctttttctttttcttttttcttttttgtttttttgtttttgtttttttgtttttgagacagggtttctttgtgtagccctagctgtcctggaactcattctgtagaccccggctggcctcaaactcagaaatacgcctgcctctgcctcccacgtgctggggttaaaggcgtgcaccacccctgcaaggcttcaaatgcccctcttctctacccatccccatcatctactggctctgtttctgtgaagagctccgacaaacacatttgccacctgactgataaaggatcaagaactaatcaacttttcttttctgaactccctttcagggcaaccagtaaagaatcccaccctgcttaaagaattaaagtcaatacataccaaaggactctttcagttaaaaataatgatttgctaatttccatggcattgatcaatcccgttcaggatcatcaactgctgctaaactagtgggatgaaatgtcactgcggaacttaacaacagatgtcccaagcacgcagtgctcaactctaataaccttcaagttgtgggaccatgtgacattatggggcgtttgatgtaatgctggaagaatagctccccctgtgaggtatccctgctccatccccaagtctagtctactgtaaccaggctgtcagtttctagggaacactgcttctgtaggagcatgttaaacagcagcacagaggccagcgagaggaagcagcaggtcaggcactgtctgtccaagcctggcaacctgagtctgttctcaggaaatgagtttgtcacatgagtatggtgactggaagtctcttagagccagagtaggcaacgctatgacactcagtctaggaccaaactagaggatccggctggctgctcatataaggcctgactccagggccatgcagctgggacctctgatatgcaagattccgggatagcacactctcagggcaagaaccaatccccagtcccaaacttcccgagtaactgtcctgcctttgagatgagcctgcctattatcctggagaagcctaggttctgttggtagagaaaaagcctagagagtgtgtcagtgctactcactgcaagttgacatgatgtttctggacttgggtggatagttcttgagaactctatttttaatattttatgttttgaaatcatgtgtatatgagtgtacatttgtacacatgagtccagtgccctcggagaccagaaacaagtgtcggagctccctgaagctacagttacaagcagttgtgagctgctggacatgggtgctgggaactaagctcaagtcctccagaagagcagtccatgttcttaactgctaaatcacgagtctagccgctagaagacacaggcgtttaaaggaaagacggacacgttatgacttccatttataacttcaatccagagcaaaagtgcaaggccatactgtccttaaattatgtttgtacctaatttgtcttatactgagaactttgatgatgatgatataactatgtgttttctttgtcgctggatgtgtgatatgtaattgttatatatttgtttatgcttattattattattgttaatacattctattctaagtgatgtaagctttcttcaaggttctttttaccttcagagacaggattcatgccactagtggtgagtattgagaatgctatgtcctggcatggtgctatataattaaagagaagatcatgctggctgtctcactgaaaagggatagtagtaagacaaacactcaactaagaaagccacccagagcctcttcagttaatgtctcttcagtccgctgcagtgccatgctactcgccttaaaccaatcctgtcagattcatcaacctgttgtccgttccctgccttcatctcacttgatcaatcagattcactagaaagaactgacttcacatcttccctttgaaatattctcttcccttcatctctctacactggatgcttcctaatttatagcctcacccaaaactttagcacccccaggactgacacaacccaacttcctaatgaaaaaaaatccctacttggatggcagtggacattacaaaactcatctgttcaaatacaaatccctggtgtctttctcaatttgttccattccgttctttccttatttgaaacagcagttcattttccagtaactcaactaaaaaatcttggtatcacttctctcttcttcttttttttttctctttcacacttcatatgcagtcacacattaaatcaaatgtgttctactctcaaaatctatgcaggctggtgtgggtgcacgtgaccatcccacattaagaaacaggaagatcgtggtttaaggtcatcctgggttatttggtgagtttgtcccccatctcaaatgtacccagagtctgtccacttcttaccacatctgccactatccaagtcacagtcatctttcatctgagttttttttctgggaagaacaaaattgggtaacagctgatataatatgcaaaatggaagaaatggacggggtgggattggaggggcagagccttttaagtaggcctgagaaatcaggcctccattacaattagcatctcaatatcaaatgtagcatttttcaacagtctcacacatagtcattaattatcaaaatgatcacttaatttccataagaaaagtagttctcattggtcacttacctaatttacttacctaacatttaagggaattatataactaatactactacgaagcataaacatttacaggaaggtagatactcatccaagtgggtgagagccaaagttcctgcctgtgtttcagatggtgtgtgaagacaacttcttttacagttgatagtgtatccacatgggaggaataaatataagcttgccctagattgctttctattgctagggtaaacactacagcccaaagcaacttggagaggaaaggatttattttgccaactctgtgtgaagtaggacacagttttctggtaaaaaatgactccagaactgattatctacggtgcttgttctttgagaagctacttagaatcaatcaggtcagaatatggaaacaatcagtcctctcaaaggagaagtggtgacaagaatagatttaaggtgttgagaaaaaaagaagccaaacaaaacaaaacaggaattggggtgaaagatgaagaatcgatctcctgtgcacatgtgctaggaagggtcagaaaggggaagatggctatattcatacactgatatgggtggaaataaagagaccattttaccgtaatgcccactctggagaaggccatgaagaaacaggagagtgacacctgaagtcagaaatatggagagtcacccaagcaagagaattccttttaatcactaattttcttccaacaatgaagagcaagtgtgtccaatatagaacacttgcttaaaatttaaaaatacaaaatgaaggaccaaataatccccagttagactcctgaactgtagacttaaatttttttttttaaatccacaaagttgaaagtgatcaacaagtgcaatctatacctgcttgaacaggcagctttggcattaagtagttttaagaacacagttaaagggctggcgagatggcttagaggttaagagcactgttcttctagaggttctgagtttaattcccagcaacgacatggtggctcacaaccatctgtaacggggtctgatgccctcttctggtgtgtctgacagctgtggtgtgttcatatacctaaaaataaattgatctttaaaaaaaccaaacaaacagaatacagttagaatattttgtaatggaaaaatttttgaattgctatggtgttttctccttctcaccagaatgtgtcagatgtggtgtacacaccgggagacagtgacctccatatattgtcctgatatgttttctgttgctatgataaacaccatgaccaaaaccaactcagagaccaaaagggaatatttgatcctccagctcacagtccattactgaaggaggcaggaattagcagagttacaccaaggcagaaaatgaagtggaaccgtcgaggaacgccgcttcctggtttgctccctcggcttgctctgctgtcttatgtagcctaggcttgcctgccaagggtggcgctggcaaccatgatctgggccctttcacatctaccagcaatcaagaaattgtcccacagatgtgcccatagagcagtctaatagacatagttccacacttaacctcccctcttccaggtatgtgtagcttgttgacaaaactatatgaccaagttgacaaaaactaaccagcacagtgatccaaaaatctattgaaattattagtctaatagcaggaaagactcaagatatacacttccgtgggtactaccctctccttggcactgttgaactaactctctctctctctctctctctctctctctctctctttctctctctctctctctcacacacacacacacacacacacacacacacgtctctctgtctctgctgtctctgtctctctttcactttcctttctcattatatctatcaaccaaatattaagaagtaatttctgtctttggcacttatatatgaaattcatagcaaaactgatcatcttggttcctgggagtaagctgaattacccatcagtgtatggaagttggtgaacactccttgggagttcttcaaggacagaggcagaaaacagatggtagagatttaaagtcacaaggggatgccgaggcttaggtaaggacagtagattgtatctggaaactgccttcttgctgtaaccctgttttcaaaggcattctggactgtaggggtctgaacacattcacagctgagaaccatgtactctgcacttgccaagttaccttttcctcattcttcatattccaaggggttcttctccatcctcatttccccaacctcaagcagtatcttttgtcagtctcttaagggtaagaaagttacataatggacatttaaagcacagtgagatgtccctgaacgttaggggcatctcttattgttcaataatacaatagagagaaatctgccatctgtgtcacagctttctttctgtgtttaaagaagtagccagttacagaaaaatggttacaaaaaacacctcccttaacttctttccccttttctcagagagtaatcctgccctttgtttctctcacagctttctagaagggttcccagcacaaggcagcatatgatcttgttttcaacgtcttttctcacttccctattcctccccagttaacagtggttgcttcgatgagcacagctgggtctcactttcacagtcaatggacccacagttaatacatttactgtcctctagattcacacccagggacatttgtggtgttttcatatttgcaatatttcctaagtaatgcttaagataaagtgtgtgtgtgtgtgtatatagaattctaagagcaaatttgctaagttaaaacatatattattttttattttgaaaaacccaaagccctatttctcttcacggggctgttctcttctcaacacagggaggattcctgtctcctcacaccctgcctctttcaggggcccctgtcttgctgttcagcactctggtaagagaaagtactggctccagctgttcttaatttgtgctccttgcacactttcactctgtggaattaactattctgccttttgttttttttcctggtgaagtatatcttacagtctggatggcatttatctatgtacaaatatgagccatagaatgtaccacagttgcttccactggcttcttagtttgctaaaactaaaacagacacttactaaacaccgcttcaacaatagaaatgtacttcctggcagtcctgaattctgggagtcaaaagtgaagatggctgcaggggtgacttctggaggctgtgaggaactctgttccatgcccttttaccagctcttgggatctttagacattcttgcatgggttcaaggagttctgttagtcttcatattatatattgtattctctctgtacatacatgtttgtctttatagccaacttttcctttctgtctctgtctctgtctctgtctccgtctctctgtgtgtgtatgcatatgtatgtgcatgtacctgtgaatgtctgtgtatgtattgtgtgtgtctgtttgtgctcgtgtccgtatgtgtgtgtgcatgtgctcgagagggcgtttgtgtctatatggccagagaacaacactggttgtctttctctcttgctcttcattttattgtgaagcaagggctctcactgaacctgggattttggctagactggctggccgctgagggctgtgggcttcatctctgctccccacattcagctgtgcctaacttttacgtgaatgctgaggacttgaactcaggtcctcaagctgacagcatgcactttacccactgagccgtctcctcagcctcagtctctcagccatatggaatgtggaactgtctcaatgacttcatataaagtcgatcatctacaaagatgggttttagcagtgtaaaaaattttcaagctaaagtataattacatcactttctttcctttcctcctttcccactaccatgatcttcctctaatattcatctccaattgacagcctctttggatgaattcacctcacccttgaatgagccccctaattgattacctaatacaaaatggtcattactgaaataatttagtcccaagccacactaaatgtgctcaacaggtatatataaagagagagagggagggagagagagagagagagagagagagagagaatattctgtgaatatcttatttccaaataagaatacaatcagagatagtggggtaaggtttgaacatcttggtgaggacgcagttcaacccaccacactgggtatgccaattaaatgttttggagctatattcaatagagctcaaaaaaagactttaagtgagagatgtataatatctatataatgagatacccagaagtgtggtgacttcagggttagcttagcggatcagtgagagtcaggctctttgtttctagtctttcatctcctggggcatcttttatcctcaagcctttgtcaaaaaatggctgcagcaattctaaccactgtgtgctcacataatcacatctcgagtaaaaaagatcaggaggactggcattcattttgggactcctctcattccataacaatgtctttccaggaatcctttcttcactcttctgcattctccttaaatttcgttggccggaagtggcctgcatggctaacccgaggcgtaaggaggtggttcaagaagtgtttgatattctgagatcttctgtggagacatgttatccaaacagagaagaggggtgaagacatttgtttggttagggccagctgtgctgggcatgtcacatgtggacacagcactgaaatgtactctccacacctgcagagtccagtctccttgcacgatctctccgagtgctctctggaccggtgacactggctttggctccatttccctgatcgcttaggccagctgatcatcttctatccattcactggtcattatgacttcttctgctttgcccgtcttactactgaacagtcttttttgtttatatgttcaacttcctattctcttgtcaataatatggttacaagcatgttctctcaatctgtgccttcattcttgactttatggaaccctttatcctgagaatctaaatgtcattgaaatttatattttctcttatgtgtgtgcctttgtgccttgcttgggaatgtatgtatatatatgacattatgaaaagaaggggtttaaaagctgtaactactacttttcatagccaagtcttttaactatctggaatgcgtccctgcgtatggtgaaactaggaaaatgattttatccccaccctcagctgtgtaatcagcaacatgaatgctatttattgaatatttgaccttaacctagggttagtaatgccacttccactgtccatttaagttccgattccagttcccatgtaagaaggtagatgtggttgcttgtgatctgctgtccatcagaagtcagaccgaggagtgggaaacagagcgtgggacaaataggttccacaggactctgctctggaatgccgggagtattacagctccttaaaagagggtaaagccgtacggcagtctgtgtggggcaggtagcaggggcagagagcccttgaaagcggcaggagtgctgatgtaagcctctgtgggcagcgagagcctagatgccagtccaagatccaataatatgatgaatgcttctggagagagagctcttcccaagtgttacagctcagtaaagacagccagtctcagatgatcctcggggaaaataacttgtgcattttcttccatgtggagagggactataagaagcttgggggagtgggacaggatttgagaggtgggcgtaaatgtttcctattggctcagtttgagacgttggtgatgctctcattgcatggggaaggactcctggtgctgcgttatgtgactgactgcccatcttcctctcagataggtgttgtgattatgtattccagagcaggttccgagacatggaggaagcagctctgctcccgctgtctcagatctcggagcatcgcggggtgtaagcacaccccaccgcaccagttcttacgcccttctgctggcacggcccacttgccctacagttgcatgtacccataccggagctgaggggagtagaatctggggttcactgaggtttgctggtcaaaagcttagctctatctagttcagtgagagatcctgtctcaaaggaataaagtacagagtgacagagtgggacacctctgtgtatgtacaaaagtgcactcatcagcacatgggtatgggtatacacttcacacacccatatgccacccttgcatatgcacacacacatacatacctaatttattataaaagttggtttctttttattactaagtcaactgtgtctgtatatgataatttgtttatccatttactggttgatggacatttggcttatattcacattttgaatatgatgaatgaaggtactctggacattaatgtataaattaatatatggtcatatagtttcatttggaaaggcgggggttatccagaaataaagaactggactaaatggcagatggatgcctgacttttggagaaaccacaaaactgttttgaatagtgctggagataatttgaaaggtaaggatatagttttaaagaataattttttggaagggatagacatggtttgagtatattgcccaagagcttgtcctcaaagcttagccctcattgtggtgacatagtgattggaaaacctttaggagacagggcctggtggaaaagaacaaagccattaggatacgatacacagaagagtgcccatctcctaccaagggttagttcctgaagtgaagttataaaaagaacaagactcagggttggcatgtagctgtgtctgtagaatgcttgcctaatatgtgctaagctgagggttgatctttagcacctcataaaacttgatgtggtggaatcccaaaatttgggagactgagacaggagaatcagaagttcaaaactgtcctcagctgcctaagtttacagccagcctgggctacatgaaagcttgcctcaaaagcaagaaaaaaagagaaaagagactttttctggacttgtttctcaggatgtgatctcttccacatagatcagatcaagttatactgtactggtgcagtatcagtgtattctataaatttgcattcgtgacattgggaatttttaagggaaaatgataaataggttttggagaacacaggaatttgaagagattacaaatgactgacacagaattgctaaacctcaactttttgatgcttctgatgtacacttttgggaaattttccaaccaaactgagggctgataaggaagcttggttattatcctaaaggaaaacatgctaagcgttgaactggccaagaaaaacgagggcacagaagatggatttggacctgccgcttcctccattgcatatttgtactatatttaagtgaaggcagtgttctcccaaatgaattttttcaagctacagtatttgacataaatggaagaaaagcagatcctccctacccatgccattacatgtggaaagcatgcagatcttggcacaacttccttcccaatacttcaaaggtcttgtctcagtctttctcttccttggggaaccaggaggatctgtcactgtagagcacttccttcagtgtaacatgttgtgttcacttagcatttgtcacaaccctcctttttgctttgtgctgttgtccatgtttcatcttccagtacttctaatgagctcatcaccatctctcctttgtccttgtcacaaccctattctgttacttcctttgggtgtcttacaggcatttcaagtccctattctaaatggaacccatggtcaaggtgacttctgctggaagcgcttttccagttgatggcctattcatccttctagttactgactctataatttctctaacaccatatattcacacatactcagtccactagaaatccacagtgaactcagaatctatcgccttttcttattttttcttttctcccctctgccttcttcctctccgtccttctttccttcctcctcctcttcctccttcttctctttgctcctccttcctctttcttcctcctcctcctccccttcctccatcctcttcttcttccttcttcttcctcctctttcctctctttcttcatttttcaagacagggtttctctgtgtagccctggctgtcccggaacttgctctgtagaccaggcacaccttacaggattaaaggtgtacaccaccattcttggctacttttttcctatcttgacttatatcttcccttcctcctccatggctcaaagtcggatctttgtgtcatgaatactgatctacctgcttttgtccctacttccttcagagtacagcctgcaaagaagggcattctgatatctcctatttcctgtgcacaaagtgttctgttgcctctaatgccacaatagataaaagtccatggtgaaggtcaaatttgcctttctttctttgtttccatcatctccttctcacttgctttgctccagccaaatggtttcttgttaacacatcagatgctagggccttctatccagaacattactccattggaagttactactctaaggctctgtctcccttcaattctttgttcaatgtcatctaatgtccccaccttatatactgttaaataccatttgctgtccacccctaaagctcttatcctagccatttctccctattttcacacaaaattgtaatattctagtatgttccacaactttcataggttttttttcttgttctcagttttaccctctgcacctaacacatggtagaatttaactaaacgtttttctttttctttttaaaaaatttttattagttattttatttatttacatttcaaatgttatccctcttccttttttcctctctaaaccacctctccctcctgcttctatgagggtactcccaacccaccaacccactcctgcctcactgccctagcattcccctttgctggagcatcaaggtttcataggaccaaaggcctctcctcctattgatgccagataagaccatcctctgctacatatgcaggtagagctctgggtccccccaggtgtactctttggttggtggtttagtccctggaagctctgggggatctggttagctggtattgttgctcttcctatggtgttgcaaacccttcagctccttccgtccttcccctaactccttcactggggaacctgtgctcagttggctgcaagcattgggaaggctctggcagagcctctcaggagacagctatatcaggttcctgtcagcaagcatcagcaatagtgtctgggtttgggggctgcatatgggatggatccccaggtggggcagtctcttggtggcctttccttctatctctgctccactctttgtccctgtatttcctttagacaagggcaattctgggttaaaatttttgagaagggtaggtggccccatctgtcaaccaggggccattcctcacctcttgatatggtctctacaggttctctctcccctttgttgggtatttcagctaatatcttccctgtcaggtcctgggagcctcttgctttcatggtgtctgggactttctgttggttacgcctagtttcctatctcccattgctacacacctttgttcaatttccagaccctctgtacatctcccccctcttctcccacacctgatcctgcccccctttcccctctcttactgtttttcaaatttgtgatttagctctttctagggacaccttcaacctcaagaattttcttatataaagaccctgcttagaaaatcctcatcgcttctttgcatctcactgatcacccatttctcccacaaggtggcagtctctactttaaatataggctgtagtggcctcaaattcaagactcaagctagtccctgcagagacagcttgacctggtagaccagctagctggaaagttcatagactgtgaatccttatcttaagagccagatgtgttgaaggaatggtaaaatttagggtttgggagccttccacaggagtggcacattataaaggtagaaatgtggttcttatgggagtggtggcagtgacattctaaaacccagtgaaagctgtcaatataaaaactgggtttacagacccagaaagacatatatagtatgtactggcttgtagggcatagttgtaaaataaagaataatcatgctacaatccacaaaactagagaggctaagtaataaggagggctcaaggggtgactcatgaatctccctgggaaggagaaatagaatagatatcaaaggtgagctggagatgggtaagtatgggaacaggattaggtcagggtgaagatgaagggagagggaacctggagagacaactgaaattggggtgcatttgggggggtgagatagaaacatagtacaatggaaactcccacaaatctacaagagtgaccctagacttctaataagggaagatatggaacctgaatcaatcatctcctgtaaccaggcaagacttccagtggagagattggaccaccaacccagcatttgacctacaattcttgcctacaagatgtgttgggtagaggtggcacagaaattgtagaagtggccaaccaatgattggtctagcttcagacctatgccatgagagggagcccagccctgacactgcctagagggccaaaacccgaaggctggatgaccaagagacagacataaccaggaaaaaagcaaaaaatgatattctatgatattctgctatacttgtatgaaggagagaggctccatccagtaagtagctatggaaacagatgcagaggctcacaacctaacattaggcagagctcagggaatcctgtagaagagggggaggaagattgtaagagtccgaggggacaaggacaccacaaaactaacagaatcaactaaccttggccagtaggagctcacagagactgaaccagtgatcagggagcctgcatgggtctaacctaggcccttggcatatagttatggttatatagcctgatcttcttgtgggactcctagcagtgggagcaggacttgtctatgacttttttttttttttttttgcaagctttggggacccttttcctcccactgggtcacctcatccagccttaatttgaggagaggtccttagtcttattgtaacttgatatgccatgtttggttgatgtctctgggaggcctgctctcttctgaagggaaatggaggagaagtggaagggggtggtggaaaggcctggaagaagaggagagaggggatataatatatgagagaaaatttaataataataacaactggatttaacaatcatatatatgtttcccctcattacaagaccttaccttttccttccctgatgatattattctagcatctaggcatgaccgttcagtactaatcttgaacatctcctgagacctagaatcatatgaatcacttttttttcttctagaagcaactctattagaaacataggtgcaaagtttggattttcctgtagggggcaacattgtctagcaaagacaacaacatctggcctgcaaggcagttctggagctagctagttggccttggacaaggctaagctgctctgagcttctttacttctaagtaagagacatagagtcctctgctggctggtgtgagcttttgatgtgagcatgagtcattggtatcttgggcagtgttccactcacaggaacattatggcacggtcacaactgtctgacctttcctctgttgctgttttctgcctttgctcacctggagtcagccaaccttgaaaaactcagaggaaagggaaggcatgagaggtagtgagtggtgggaacagaacaagtgaagctctgttggcaggagcagaggagtagaaaagaggatgcacgcgttgacctctagtcttgacatgtgggctaacttactctataccaaaaactgtaggactccattttggaaaacaaggaaaaaacctgccctcagactaagattcttcttcaccaggaaagtctttgtttcagcaagtcaagaggctaagaggggcttcttatgaaacttctgtccaatgcacatacttatgaaggcatctcaattgtcatgggcctttggattcttttgtatcccaagattgctcattaatgtctagaccagtggttctcaacttgtggtctcaatcccttttctggggaacaaccctttcacagaggtcccatatcagatgttctgcatatttgatatttatattatgattcatattaataacaaaattagttatgaagtagcaacaaattattttatagttggggatcaccataacacgagaaactgtattaaagggtcgtaaagggtcgcagcactaggaaggttgagaaccacctgctttagagcataacctaggaccactgggagcatcctataattgtgtgggttgggtttgttgctctctgtaagaaggaaacattcacagcaaaggttcgtggaggggggagttggcttggttttaagagtttaagggaaggttcaaggaagctggctttacttgaacagtgtcatggaatcaacaggatgagtctaattctctgatatgaaatcttgaaaaatttttctctaccgggctggaaacaagatgaaggcctaggtttggatagttaagatgcagcaatcacttcaatcagccaggtacaaggaaggattcggcatcatttcttcatgtttgtgatttctttttgttttgtttttgtctgtattcacattgcaatctaccattgctttatctgatgttggtgttgtgtcaaactgcttgtggtgaattgaagagacttcagatgaggatcgggtatgaggtcacattgtttgtgctctctgaatccagagctgtttgtccttcatctcccagcatctccacgaaaacccctgtccatttcctgtcctggggaggaggagctaaggcaactagctttgctaccagctctcttactctggagagagatgaaaagaacgaaagcagggaactgtctcagtctccttatcatctggatgctagggaccaaacaaaaccttatttctctaggcacttagcaggatgcccttgagtatattatacttatagcatcagttccagaaaatgtattcaaaatctgtaaagtatgacgttcagaaaattcaaacaaagtgaagaattctgggaaaagaaaatgaaatcttttttcttctggcaacacaaagaatcagatgactttagcttctgttctgatctaaaaagcatacaccttacgcaggaaagaaagggggaactcagggaccttagtagagtgcaccatctgtttttcattttgtttgagatctttcatttcctttctccttgaccttactggcaaagtctgggcctggcatccctctgtggtttgtgtgtgacttaacaaggacatattttaaagttggaaaagaaaagttcattgtaaaaggtctgtagtcctccttcctttcacatccttgggcttcaggatgagggatggacaccgaggacagaaacggtttatttgatagcatcctagacatgtaagacttatggcaacccccctggaaaatatgcaacagaggaatgagacagcctacatgcacattgactgatggtcagacaaagcgatactgttatacagtgaaatgttgttcagcctttaaaagggaggaaatttaatacatacgtggaggtttgaatgggaatgacccccacaggctcaaatatgtgaatttttggtttccagttgaactatttaggaatgactgggaagtgtggccttattggaggcgtgtccctgggagtgggttttaatgtttcaaaagtccatgccagactcagactcccccccacaaacacacccccaccacccgctccttgcagattagaatgtgcattcttagttactgctccagcgtgatgctctctgtcctctgagactctccctctgaaaccctaagcaagctcccaattaaaagctttcttctatcagctgctttggtcatgatgtaacctgatcatagcaggagcgaccctaattaagatgtaatatagctgggaacatcatgctaagtaaaattagccatttacaaagattccaggtttgtgagatgcctatcagattgaaggaaatagaaagaattgtggtagccagggactgggtaaaggaggggtggggtgttaatacggatgagttacaaacatcctgactatttacctggacacttaaacagagtcaagcagaaggtgcatctcagtggtagagcacttgcctagcatgtgtgatactgtatttagttcctagtactaaacaaaacaaaacaaaacaaaacaaaacaaaacaaaacaaaacaaaacaaaacaaaacaaaacaaaactacccagtactgttaggtgtcatagtcccaaaactcataaattctgttattataaccaaagtagagtttgcatcttgatgattgcaaactaaagacaagcacagctgagaaataagatcagagaaagagttgctgcaagcagcaggctcaagaagaaaagatagtagacacttttgaggcatgcttaggtaaaaattgtgaagcatatttttgcaggattacagtggtggatgagaacaattttgggggtgctcaccttgaatcataaagatggtaaccagtatcacttggcatgctcaactgtctttaaagaaagaaaagttttagctggaaaaaggaaaggatattttaaatgtcttactgtagaactttgcccctaaaagttagatcttaacattatttttaatttgttacaaggtaaaaaaaattcaaatacatagagaaatttaaaaagtattagaaaacaaaacaacaacaacaataacaacaataaacgaacaaaacaaaacattatttcctggagcagccaggaaaaagacacctaagtgcccagagctactcccctgagtgaatatgtgaagaacaggggaaagagggagaagagagagtacttagtggagagacagaagagaggagggtggagctgagcaaatcatgtactgtagagagaagtggaactggatagcagttagaaacaggcagacatgaggagccatggtgatgtctgagcccgggtgctaccaagggccgtgtctgcttctgtggcactgctccagccagagtctgtgctgatgtctgtggccagagttaacaccaaagaccatgaggatgtctctggcatgggctgccacttaaggccctgttgatgtccaagcactatacaaggctggctctgcctcttgcctaggcaccatgggagagctggctctggtgctggggatgctgaagagctggtcccagtaggatgagtgtgggagagctggccctgtgtccctcaccaaatgcagcactcagatccccacatctcttcccctgggcagcaccgtataactggtcgtggtaatgagagcaagggtgagtggccagagggcatgtgagcaggagagctggacctgcccctggcttggttaaagtaggagagttggtcccagtggtacatgtatgggagagctggtgagctgaccaactcagtttccacctaggcccagatccaggggtctgagttggcccaccagaacatccaccccatctatgaactgctggagcaaatgaagaggctggtcctgcagatcccgagctgtgggcactccatgacacagggtgacaacaggataactgagaagagttccagtgagggtccaatattgatgatgtgacaaaagctagaggctttgggaaagaccaatcaatgacttattgcaatgaacatttgcaaggaaagatgtgtggacaaatgcgtatactgtggtatgtgccatgacaggcggcaacttccacagcaagatttttatttaattcattttattttttgttcacttttgggtagggggaggctgccggactgaagggtaaaatgggtgggtttggaatgcatggtgtgaaattcacaaaggaccaataatttttttttaattttaaaaactgtacttataatgtatgcaagatgtttttgttattctctgcaaattaccaactcttccaagaatcaagtcttccaagtcatgttcagcagtactactccagtctcctctcctgagcagacagccctcctccagtgggtatcttgaatctttattacttcttgtactggaatataagacctaagagaagcatagaaataatttgtgaaggacgtgagtttcagcacttaaataagagtttgctgatgagaaggtctgctgtgtggcagggtctcagggcaggataactgctctttcccaccacgcttccagaagtggaaaatgttctctccttcttccatcttcttctgtttcaagtcctgcagatgctccaaaggaaagacgtagagatttttatgacggttgggacttagaacagagagttcttgagaaggccactgcattaattaccagaaagaaaacataaaccctggaagccgggaagccgccaaacgtctattttctcaattgcctgtgatggtactctataaattttgattgacactaaagtacatgatgtcatcacttttcctttttatgtatgtaaacggtacggaaggagagggccctaatggtttcctggcatcgttttcaaaggcaggtgctgatgaacttaagcttctcagtctagactctggaaagaaaccccatcaaacctttcacattttcatttgtatcccctgattctcaacccgaactagggtcagaactgcctggggtgggggtgggggtggggtggaagtgggaggtatgaatgccactgatgatcccgcccaacattaccaagcccacctgcagtaaccctacctacttaaagttttagtctgacacagagtaattggacatatttatgagtacaatgtggcatttggcctatgtatacactgtataaagaacagtgacagacagctctatcgcctcaggtgctcatgacttctctgtgttgggaacattcggtcctctctacttgctgttttgaaacattgcccttactgggggtactaaagaaccttaaggactttttttatacaaggtgtagtatgagacagaaaacgctggtgtcttcctattttcttcttaatgttattagatgcttgggtcattttaatttcacagagcctcagcctcaggtaattttcatctcacagggacattttacacagctaataggatggtgtcaagaactgactgcccctgggtatatgattccagatgaagggtatttcttgttgctatctatgttccaaaaatattttttaaactttttcaatgtctttctttttttcttttatttattttttttatatgttcctaagattgatatttattttacatgtagagttgttttgtctgtagatatgttcatgcaccatgtatgtgcagtgactgtggaagccagatggaggtgttagctctggaaactgaacacactgttgggagccaccgtgagccatctctccagactcttcaaaaatatttttaaaatctgttttccatctttcattttatagagatcagaactgccaggagatactgagtacattcaaaggagcatttgtttccaagaacccttgcaacatcacaagagaagactacgccccacttgttaaattggtcactcaaaccataccatgtaacaaggtaatgagggcgagtaattccttttaaaattgagaatgaaagtcagaggggagacatctgaggaccaatgttaggatgcagacagaaaggagaccttggcataggcatcatttgatatggctggtggggtcagattggtggtggtggggctttggagaactggtgtaccatcacagtttaggacatctggggaaggaagtaagagagagatggggacacagaggaaagacagaatctagcatcagttccatccacacaaacgagagtaacccaaatttttgtaattatggaactttcccctggcttctgctaataagaaaggagtaaaccacaacacaaggcgaagttccattagaagagcgattttcttacgtcttcttagctcttcagagctatcctctggaggcgcaaaccaggtaaagaggctttaaagtgaccagctggaatgtaaatagaaggcaacatggagtcagaggaacccagtgttcggtcctttgagtatactgggaaaggtctaccacaagttacaactcttacaaagcctgtgtttaaaagaaaatgtcacatgtccaaaactaagtgaagcccccaaacccactcacaattgtcagttctcatcctgtggttagtaagctggagatttccggggctgtttccccaggagcctcagtacagtgctctgaacagaggaggtctgtggtagacaatagcaaaactgaatttatattagtgcatgtcatttattctgatggtttctatagtttttatttataaaaggtatgtatgtatgtatgtatgtatgtatgtatgtatgtatgtattatgtactatgtattgtagtgctggggatggaacctagagcctcatgtgtgttagcactcaatctactgctgacccacatctctaactcttagatttatttttggacctactaaattgtggttttgttctttctcagactctcttttggagcaaatccaaacacctggcccatcaatatacttggatccagggaaagatgttcaccctggaggacaccctgctgggctacattgctgatgatctcaggtggtgtggagaccctagtacttctggtaaggatctgaaccacctaggatggctcagggtgagtgggaagggagctttgagctgcaagggaacttgaaaggtcaataggcatatactctaatgccatcagtgaccttagtgacaaactgggctctaacaaaacaaaaaaaaatcactgtcctcttgaaatacaagctttggggtttagggttgatcttcaagggatagatatacatataggggaaacatcaccataagaggggaagcaagagagagtgaaaaaagccaaggtcagtttttactcctttttgtgatcactaatctagtccaatgtcccaatctcccaagaaagtctttaatccattcatggattaaaaatccattcatgggggtaaattccctcatgagctcaactccatttagaggtcccatcaacaaaacacattgcaacagagaattcagcttaatgggaacattggtgacacacacactatcaagccacagtgctactttataaggctgttgaggtaagacatccccaaatccagtctctccctcactttccctctctacatccttcctgttctccccttttcctgcctcttccactttcctcttttccctcctccctctccactttcttctttctcttctgcacttttggcaagaaatctcctccttaacctttatatatgtatttacacacacacacacacacacacacacacacacacacgttatatattcttgaacataactctaagtcatttttttaaaaaaatttaaattaaaattatatatatttttatctgtacagagtaatattggatataaatagacatagtgaacggattgttatctgtgagctatttaacatggacaactttgggtaccatcttaaggtgatctctttctttccccttcatagccagtgatgatctatttgcctagagagccatctgtgcatctcccctcacactgccttttagcaccatcacaccctctccatcctgctgggaatgctataaggttttactggtcactctttaccctcctaggtcagtctccatctgacaccatagtttttctcagagtgaaaatgggatgatgtcgatctccctctagaacctaacaatctctcttttgactctaggctaatggtctaaagacctgacctctgtgtttcagatgcctcaccttctcattcccttctccatcctcttttctgatcaaagctcatcatggctctttgcctttgcaccgtgccataggcacaaggtgcccttctctttagagtctgtctgaagacagtgattcttcttcaaagtaaatttcaacgtgaatctgtctctgattatttgacttcactacatcacatgtcctatgaggcagggctcccacctgattcaaccctctatctccagaacctaaccttcagtaaatgtttatatatatatgtgtgtgtgtgtgtgtgtgtgtttatatatatatgtatatatatatgtatatatatatatatatgcaaataaccttgagaacagtgtcatagaaaccatgcttctactctatactttgcaccacactaagggctaaacctgttttggtagggttgactatagaaagcctgagatcacctgagcccccaaatttatggaggttgaaaaggaaactctccataaaagagaattgccaggaatcagaggactatctgggggaaagtgtcttcttcccgaaaaggcctggccttctccctaagtgttcctggactccaggggagtgagaggggccggtgtctttagggtgcacttttgttgccatttcccagaatggtgagtcaaaacccatcacagtgttcctgtctgggatctggacggggaggtaaagagttggaaggaaatcaggggacacttacttaaattgggttgagctgtgtccattctccagcctctgtcttggcacagatgctgttggaaagttctcctatggggattggacagccaagaacggagcccaaaggtacatttcctttccatttaactgttttctataaacaatgtgttttagatatgaactatgtctcttgcccacattggagtgaaaactgtcccaacaaccctattactatgttctggaaagtgatttcccaaaaggtaagtcccaaatagttaaattctagagttttcactgaagatactgttcagtccatgactggttgacttctggccctttgggtggggggtacagatgattttaggtgtaaaagtatgaaaggaaatcatgccagaagatttttctacacaacttcagaacacccaggaaggcttgggagctcaggggaagaaacctaacccagtgaggaggtaacactcactggctgtgtctaccaggatgctaggcttggcttagtcctgggacccaggtattgacttgatttctggaacagtcttaataattggcatttgtagaccacttgatgtgtgtccaactctttgcaggagttaagaactctagcctcacaacagccatatgaaacaccatcaatatcacgactacttgtaaaaatcttttttaaaatttgtttacctttatttttatatgaattggtgtttttgcctgcatgtctgtctatgtgagagtgtcagatcttggagttacaaactgccatatgggtattaggatttgaacccaggttctctggtagatctgtcagtgcctttaactgctgcactatatttccaacccccaaaaccaattttcttagacattctgatcagtttccttatttcatcttcaccaaatggaaattaacacatacctagtctagatagctattggtgcattcaaataaaatatcactagcttgttaagtaatggaacccacctacacaacaaatgtttattgaagacttactgcatgttttaaaaactcaaagacgctgtatatttttgtttgctcgcttttacagagaatgttttccatttgtgttatcactttgggatatgttttacagccacatcatctctgaaaccccctacagcagttcatgttttatataaactaaatgcttccttgtatcacatctcagccttggtaccaaggctaagatgctgagggtgattggaggcaccttggcttctgagacactgtgcacctgtaccttgttctaggatctctttgaggaagacaaacaaactagtccctctttttgacaataaggatggttcttcttacaggtttgaattcccagatcaccttgttgctaagttgtgtgaccttgaggccaacggtgccaatgcttactttgtgtcagaggacttgtgagaattctcctttatagggttcaggactcttctgggtcagtgcttaatgattaatcataaggagtaggacttggtccctctgtggttacacaagcaccactggacttcataataaagctctgaatctatctgtagtgtagaagtcacccgcagagtaaagtgcaggttccccaacaaagtacaaggccatctatgaactgaatattcaatatcgactgcaactttccccacaaactactgttctcctaaaccaagggccccttccagtcacagcttcaccagtggagtcctgaccgctctttgggacgtgggttctgtttgctatacagcactttcttggtctttcctagtgtccagtgcagagtatcttcttttctcctgtcatccttttcatccctggaattttactgagtaaaacatacctgtgtcatgcactaggtataaagcactgaaagttctagaagcacataggaatccaagctctttgttctcacaaagctcttcgtactgacggctaaaactgttcaacccgccataacaatgaaatgttgttaagtaatgtgcacagatgtcgtggaaggagacccacgtcccagaggtctgtctccaaaggaagctgaacagtactccgttcacatggtgacctccagtgcttagcagacctcccagctgaaagttggttgcatgaagaaataaaactccttgttcaaccatgttcttttattcaagcaccacactccctccttctttatgcctttctagagcctcaggatcactgcctcttacctgggcttccctttctacagtgttcccctaaattgtccaccttacttctgctaaataagatgtagcatctacagaacatgataccaagtgagtgctttcattcatgcaaattgccatggctgcattaagaattcatacaaagtaaattcttcctgtggcttagactattggatagattcaccattcttgtactagaactagggaggctattctctctccctctctagttagtactaagtactctttggatggaattgctgaagaataatgatgaacttccttttcttcctcctcttcttcctcttcctcctctttctcctcctcctcctcttcctcttcttccttctcttcttggttttggtctttgacagggtttctctgtatagctttggctgtcctggacatcactctgtagaccaggctactccaaactagcagagatccaaccacctgcctttgcctcccaagtgctgcaatcaaaggcatgtgtcaccactcagtctggctgacggacttcttttttaagtttgcagaagatgcctgtggtgtggtccaagtgatgctcaatgggtccctccgtgagccattttacaaaaacaggtactcatttcctttctttgtgcaagggttaattatcacagttaccatagtctcctgatggacatggcattcctagaaaggatgtactttccatgtttcatatcagtcctgaagtgctgagcttttaaaagggaaagcttatggattcgctcctttctgggtcaatgtttggtctggttcatctaagatcctccaaagttcctaaaggccattgcaggttcccagtcattgcccttgactttttgaggtctcacataattttcttagcttccttccccctgcattctatgctctcatttcatcgatactgtctaccctgcatctacccgtctccctgttagcatcctcaccatggctctctcctgtgtgaagagcaggaatcccacgtcattggaacatcagaaaccatgcagggctgtgatcctcctcctcctcttttggaagtgttgccagcaaagtcctgtagtgatataatggtgaagacaccagaggtccttatacatactatatgtgaccttgtgcaggcatctagcctctaggttgaggatgcatagaaagaaactgagataaagtgtgaacagtgctgcactccatgcctattgaaaattctctagtacatattagcttttttttttctttttcatttaatcctcagggctgagttggtccacactcaagccttccttctctggcctccttctcgccttagtttctatcatcatcatggtcttgttctctaatctttctctgatgagaatgcttctaaaaatgagagcacatattaattttcttcaggcactgtagataccctcaattaattgttcctttcttctgctttagtatttagtattataaagccacatttaccttttttccttcttctggacctttttttgggggtggggtggggggggctttgggtgaaagtgctggtgttcaaaatctcaccctctgatgttggagacccaagtccttgcctcaggatgggtagctgtccacactaacaagaaaggatctagaaagatgttgttgaatggacagtctctgtttctaactagctctctggtaatgctactctttgagcagcaagtatttttttaatgtatcagtcagcatcgatgtacagttaaaactcttatcttgaaaatctcataaccaagagtcatgttgaaagaggaacagtgggaagcaagggaggttctgttcaatcgtgcagggacaggaggtatggatgccctgcgctttggcttgaggtcagttatttacctcttctgtttcagcacctttggaagtgtggaagtctttagtttggacccaaataaggttcataaactacaggcctgggtgatgcacgacatcgaaggagcttccaggtatgttattgcttagtagcggagtgatgagaccatcactatgactcagcctgcagaaggaatccaaggtcacaggaacacactgggaatagactggcttagcaaatgaatggggcttacacacttggccctccttctagtctctaaattctgtctccacaaccgacagtgactgcttcacacctttgctcctggtgaccagagaagccccagagggggatgtctgcctcacctctactcagtgctgtttcaagaggcagtaagagagactcagagagtgtatgaaatatcttattatttgaatatttcttccctagtaacgcatgttcaagctcctccttaaatgagctgaagatgattgtgcagaaaaggaatatgatatttgcctgcgtggataactacaggtaactgatttcttgggaacaaaagagctgtgtgtgctgagagggctttagggatcctctcaggccttggtggtgctctcactggtctctgccctgccaccaaacctagcttgtttccctagccaatggcctaaatctggctggctgtcctccgttccctgcctccttgcctgccagccctaagtgatgtcttgacttagaagctgactgatgcccagagtacacatttctttcttgctttactgctgtatttcctatttcagaggagcagaaatatgttttgccagggcctttctcccaagttttaaaatcccttgactggctataaatttgcatgtgaaatctccttggttagattcagatgtaagtatctaatatttggcaaatttccacatgagagtctaacaagatttatcgttctagattaagagcaaaactgatataaataaattcttgaagaaaatttaccattagcctatgggcaggtatgttgtctttacagtcacctttatctttaaaatgtcaagaccccctcatagtttttaactatgttgtggccaatgatacaggcagggacatcttcctctacagagaagcacttttggagcttttcctatgaggaatagcttccaccaagactaaagcagagagaaaaggctttatgtacaagctaaggagagggaatatttttttttaatctcttcatgtcacctaccatcaaagacaggcttaaaagatggatggctcatttcccagatgacccaagcttccctccaatcagctctctgttctttggaaacttccaaaaaaaatgaagaaaacaaaacaaaacaaaacaaaacaacacaacaaacaaagacaaaaccaacaaaacccagaaactgtcaacatgcatcagttaagtgcaaaaacaaaagaaatgatcaactataacagaaactctctatgcagctgactaggctaattcactcacagatattttgtatcaaaaagaagtacaggaagactaggtgaaggttgagaaatgtagagcctgtggttttgttagctcacattttatgaaaatggcagtctttttaaattacaagttagatgttggggcccgccagcggcccacatgtctgggttctagctgggaggcatcttggaatctggaagagaagagggagctaggcggtgcgagagagaatggaaccaagacaacagtctaatcaaggttcaattttactattcccagacactgggttatgaagaaggggaaggggcccattcccgccaaactggagtttcagtttcaggtgaccacgtgatagctccggaacagctaggcggcaggtagtagcagtgggagtggcagaccgataaggtggcaggctccacccggaagctctcttcgtgctaacagtgaaaactgatcagccaggtttcaggctgaggggggaggttacagttagatacttacgtaaagcttgccttgtgtagggggagtgtggtcctctcacaatgtcgtccaaacctcttgaggaaggtccctgagttctttgctgtcaaatgctttcacccagaggtcaccaggaagcctctaatctgaggaaagaagaatactcaggagggaactgtgtgggcctggttccagtggccgtatctgctgtcatctgggcatcagctgttaaatacttgtgacacatctgagccagttgtttgtttttaacctccacatattactgttgtacactctctttggtatttatttctatggtcttacaagtgaactgcaactaacttggcacatgctttcaagtcatttactcctgggtcaggcctttctcagtgctgtctctgagctcagatggatgtggatgctcagtggttaatctttggttgctatgatgcgtctttcttcattgacaagttggaccatagtgacatcatctggtctctttcctcttaagattcttgtcacatttatatttatttatttatttatttatttatttatttatttatttattatgtgtgtgtgtgtgtgtgtgtgtgtgtgtgtgtgtgtgtgtgtatgtatgtatgtatgcacacatgtgtgcacataccatagccttcgtgtggacatcaaaggacaacttgtaggagtcagtgcttcgttcaagcacgtgaactctggggatcaaactctcaggtcactgggtacggcagtgagcacctttgccccatgacccatcttgccagccctcatccagtccctgacttcctttctttcttctctcccacaggcctgccaggtttcttcagtgtgtgaagaaccctgagcacccatcgtgtagacttaatacgtgaaggatctggatcttagatcacctgtagcctggactgagatgaaggggctcagaagcaacactggtggaaagctgaaactgtcagggagaagcctctactacagtgttaacaccagagatggaagaacttcccaattctctgtgtactaccaacattcaagaaaaattactccataaaccagagttaaacttctatattgttatattagtctaactttctcatgtggtgcttctgtattgtttatatattgcttacatccttttattcctcttttaatgatctctcttttctctctctctctctctctctctctctctcaatgaggctgagaatccaacctgagaactttcatacatggtggataagcctatataccactgagctaaatcctcagcacagctgataacatcatttttgctgaaaaatggccaatcaaacttcccattagacaaagaaagtcaaatgtcaagtatatcgaaatgaatgaccctttttttttttatgttttttcattcttcccacagatattcacatggtaaacctgaggtcatagggtcattatagggaaggtgctgtgtgggaactacccacgtgccctgtgctttaatctttaactcaacacgtccctgataactttgagcattcttttcttttcttttctttccttttcttttcttttcttttctttttcttttttttaaacagaagaaaatggagtttagagagataattgattttcctaaagtcacattcttaagatcatggttacatctagaattaaatcagttctgtcaaagtccacaacatatgatagtttttttcttttccgagcttttattgccaaattggtagtagcctgtgttgtcgtctagcaaatgctattgcattagattgaatataatagaatctgaaatgtgatctttatggaagatcacaaaactaattacttgcaccctctttctcttccacttcattcttggtgccttttataggcagtcaagagttaacatatatttgttgctaatattggcaatttatgttttctatcctttttttcttagatcagtcttgctcagaatcactggttttgttatgttgttgttgttgctattgttattgttcttgtctttttcaaagctcaaatctttaactttcctcatttatttatttaattgagctttagtctttatttttagaaacatagaaatttcttctagctatctggaatatcttcagttttttgaggcaaatgcttagaccattgatatttcagtctgttttctacacatgtactttaggattctaggtttctccctgagccctgctttcgatgtaacactgaatttctgtatgtctttactggttagttactttgatagtttgtatatgcttgacccagtgagtggcaggattagaaggtatggccttgctggaataggtgtgccactgtgggtgtagtcttaagacccttaccctagctgcctggaggccactattccactaacagccttcaaatgaaaatataaaactctcagctctgcctgtgccatgcctgcctggatgctgccatgctcccaccttgatgataatggactgaacctctgaacctgtaagccagccccaatttgttgtccttataaaagacttgctttggtcatggtatctgttcacagcagaaagaacctaactaagacagttaccattcagttcaaaataattcttgattttattgttatttagacatgtgatatttacttttcaacatctggagaattgtttaggttttttttgtgtgtgtgtctttagtaggtattaataaactaaattgagacaactccaaagtatttgcttggtttattgaaaatagcataaacagagccaggtgcttctgtattcatgttttgacaccagtttgtgattgttgaacaatatatcttatttctaaacttttaaaaagctacttaaagacattaacttgctcccttacaatatgttgatggttcagtccattaaatgcttactttgtaagtacgagtgcttggattcaattcccccaaaccatgtgacggttaggaggcagaagcaggtgaatctctgtgggtttgaagccagcctgacccaggacaaccagggccacacagaaagatgttatctccctcatacacacacctcaaataaaacagtaaacaacaacaaacaaacaaacaaacaagtaggtgagtggtgcaccattggaatctcaggaatgaagaagcaaagacaggttccctactcccttcctcacccccaggctaactgataagcccaggcctcagagaaaggctttttcaaactgtcaaggtagaaggtatctaacaaatgacagctgagtgtgttctgtagcctttctgtgcatgggcacacatatgaatctgtgcttgcctcccccttctcaaatatggtgttagactgtatgataaaaattgttaacctgtcacaaagccttgacaagttggggttgcattagttagaatatatattcaaaaagggtgggtagtacaccactggattctcagtaataaagaagcagagacaggtttcccactccctgtatgggggagtgagaattatatacataagaatatatatatatatatatatatatatatatatatatatatatatgtgtgtgtgtgtgtgtgtgtgtgtgtgtgtgtgtgtgtgtctaccaacagaagatccaagaatccagtagttgttcagttcatgaggctggatatctcagctagtcttcagtatatgccagaatctgaaagaagtaggcaggcttctacttccgggtcaaagccatggcggtggcaaattcaagtccagtcaatccagtggtcttcttcgatgtcagcattggcggccaggaagttggtcgcatgaagatcgagctctttgcagacgtggtgcctaagacggcagagaactttaggcaattctgcaccggagagttcagaaaagatggcgttccgataggatacaaaggaagcaccttccacagggtcataaaggatttcatgattcagggtggagattttgttaatggcgatggcactggagtcgccagtatttaccggggtccatttgcggatgaaaattttaaacttagacactctgctccaggcctgctttccatggcaaacagtggtcccagtacaaatggctgccagttctttatcacgtgttctaagtgtgattggctggatggaaagcatgtagtgtttggaaaaatcattgacggacttctagtgatgaggaagatcgagaatgttcccacaggccccaacaataagcccaaactgccagtggtgatctcacagtgtggggaaatgtaatctagacaagacggaactaggtcctctgctgttttggtgtgacattctctctcaagtctgacaagctggactggcctctgtgtttgcttccctgtctccacagtatgcgatccaggacctggaagtatcacaaatgagaaccaatcatcctgtttaaattttggactgtaaataaaggaatttttttaatgcaaaaaacaaaacaaaacaaaacaaaacaacaacaaaaaaaaagaagtaggctccaatgccagtggaaaaaatggacttgctaacaagagagagagagaaagagagagagagagagaacaagcaagcaaagaaagaacaagctttcttcttcagtgttgtttatataggctgccaacagaaggagtagcccagattaaaggtggatcttcccacctcaaaaatccagattagaagtgggttttctaacttgaaatgattaataatagtaataataataataataaccatcatcatcctccccacacagatgtgcccagccctttaggttttaattaattccagatgtagtcaagttgacaaccaagaatatccatgcagacctgttcctttctgtcttcctctggttgaagatcctgttcttttaagagcccacgtggctgtagccacagtggacacacagtggatagctctcactggtgtctggaccactaatgcatccttatagagaatttaagtcttgacttgacaaccctcttctgacagggattcagatcttccccagctttcaagtagcttccccttcaaaatgtcctcggagccagatccctgctggtccagcctgcaacctggagcttttgcataagacttcctcccttctaggaaggctggttgctagatttactaatgtccttgctccagaacatcttttggaggtggctgctgttccagaaactcctgggccttcacatccccttcttagatgaagtggacagaatcaaatcaacttgtaagatgtgcctaagattttttttttttttttttttttttttttttggttttttgagacagggtttctctgtatagccctggatgtcctggaactcactttgtagaccaggctggcctcaaactcagcaatctgcctgcctctgcctcccaagtgctgggattaaaggtgtgtgccatcaccgcctggcaaactaaaccaccaatcaaagaaaacacatggtggaacttgtggttctagttgtatatgtagcagaagatgacctagtcgatcatcaatgggaggagaggccctaggtcctgtgaaggttctatgacccagtataggggaatgccaggatcagaaatgggagtgggtgggttggggagcagggagaggggggaggggataggagattttcagaggggaaactaggaaaggggatagcatttgaaatataaataaagaaaatatcttttaaaaaatgtgcctaagatagaaatcaacttataagacattaccaggaaaattcctcagaggtcaactttcaggccagtggagaactcagaggaggcaaatcacaaggttttcacatgatgctgaagagggccctcagaagccccagaggtagcttggaggtgtagatgttccttcccccaccccatctccctttatcacagtggttctcatccttcctaatgctgtgaccttttaatatagttcctcatgttgtggtgaccctcaaccacaaaattacttcattgctctgtcacaactgtaactttgctactgttatgaatcataaggtaaatatccgatacgcagaatctgataagccacaggttgagaactgctgccttattatcatagcacactatccgaacttttctctctgtagtcctgactttgagcatctataccattggccctgctgccatttccagccctgagcacttgatggcctgtgtgtacaataggtagtccatactcctcttcttatgtgactgttacattactgttgcctcataaactttctacaccagctctccatctctgtcttctatcatagctactcaaacagtgtagaaataacctcagacctaatgtccttctaatttccttcggctcctccatttcctattgtgataatttttgactttacagtgtttgaagcacagtttcaaagagttctgaaaaggaggttgaatgcttgaaagtgtgtgtgggggggagtggtgtgtgtatctggcaatgtacagtaattacattaattgttgctagctggtaagcaaaactatcaaatttgaggaaaaaaaccatatttttccttcagctttgtctcagttactctctgttgttctttcattgtctgaaaacagcccaactcaagtctgcatgttctcagatgcaaaagacagcatcagcaacagacttcctcctcctcagtggcccgtttcttcctgaaacaaattcccatgtttataacatgtgtgtagggctggagagatgactcagccattaaaggctaggctcataaccaaaaatataacttgtgtgtcttgggaagactctgcttggctgactgttaaatgttaagaagaacatcattttgcttttgagtaatagtctttggaaatccaggttgtaactaatctgatgcatcaggaagacttttgaatagaggggaaaggtgacaggcacaaaggagtctcattctgcatgtggccagaagaaaaggaccatagatgccccactcatcacttactcttctctggtttttgaacagagcccagataggtctttaactcatcgtaatccccctgcctcagcctcctgagtgctggggttacaagcatgtacaatcaagccagctttccttcctctttggaatctacaccaccctctcagtttctaccatagctcatctccctccaaagagaactgaacgtgaaggccctgtgagcagtccagtggtttgtggcactagacagctgagccaacgcacgaggaagatgcaaatttgttagcttccagcaatttgcctatacctatctatacattcttcatgaagcagtacagcttatcaaaatgttatgcatggtaaactgggacatcaatgggattcggagacccctgcaaggtctgggatgcaaggtgcccagcaactgtcccacggccttgagatacattttagaggagctggatggcgatattttctgtctccaggagaccaaagtgagcagagatgcgctgacggagcccttggcttttgttgagggctataactcctatttcagcttcagtcacagccggagtggctatcctggtgtagctactttctgtaaggacagtgttacatccgtggctgctgaagaaagcctgagtggtcagtttgccaccctgaaccggcatgtcggttgctatggaaacatgaccgcgttcacccaagagcagctacaggctctggatatcgagggctgagctgtccttacacagcaaaaggtcttcacacaggaagagaaggagaagcctttgaccctgatcaatgtgtactgcctgtgtaccgatcctaggaacccggagtggctgatctttaagatgcatttctatcgcttgctgcaaatccgagcagaagcactcctggcagcccggcagtcatgtgataatcctggggggcatgaatatagcgtactgtcccattgaccactgtgatgctggcggtctggggtgctttgaagaagtcctgggtcgtaagaggatggatggcttgcttagtaacccggaataccaggctgggtcccatataggacctttcatggatagctatctctatttctatccaaaacaggagagggcctttacctgctggtcagtgatcagtagtgtccgcaatctcaactatggcacccgacttgactacatactgggatacaggactctaactatagacactttccaagatgccttcctgctccctgagatgatgggctctgaccactgccctgtggaagctgtcttgcatgtgtcctgtatgccagcaaagcagtgcccagctctgtgcacccattttctccccgagtttgcaggtacccagctcaagattcttggcttcctagtcccttgtgaacaagaacctatgtggtggcagccagtcctgcagcccagcaaacaagtccagctacagaaaaagagaaaagcccacaggcactcatccaggcctcgaaagcatcaaggtggtcccagaaaacaccagaaaaacctgatgagttattttcagccttctgttagcttttcccagacttttggtgtggaactacctaagctgcctctggtgggcactcttgtaactccaacaactctggaaggggatgtgatagccacaaagaaggataagcaggccaaggtttctgaggtcagaaatgaggaggaggcacagacctcattctggaaatctgtgctgagtgggccctcagccacgcccctctgcagaggccacagggagccatgtgtgatgtggattgtgaaaaaaacaggatccaacctgggccgccatttctttctttcgttctttttttttttttaagatttatttatttattatatataagtacactgtacctgtcttcagacaccccagaagagggagtcagatcttgttacggatggttgtgagccacgatgtggttgctgggatttgaactcaggaccttcagaagagcagtcagtgctcttaactgctgagccatctctccagcccctgggccgccatttctacacatgtgccaagccacagggtcctccaaatgacccctcatcaagctgcaacttcttcctgtggaccaagcccagatgaaccaactgaggcctaggaatgtctacctggccaccagggtctgaagccaggtctctatctcctaagttgccttctccctgaggcttcatttcttcctttcttcttccccttcctcttcccttcccctgccctagcttcccctgagacactcttcttctcacacttcttcctctttgtccacacaggaacaagctgcccaggaagttgtaatcttaaactcctgttgcctggaatgggcaatgcatttgttcttaagcaaagtctgtgcctttatttcagtgcttaaaaaaaaaaaataaaattcttgggtttgggaatcaatcacacaatgacatatctgttctctgtgaagaaaattcacctgtactcctcttaggatgtgatacagtgacataagaaaatgcatggttcttgctaagtgacacaaatgtgagacagcacttagaagcttgatgtaaagagtagacctatagagaagaggcctaccaataattacatctggcactccacacagcatcactgtcagccacctctgcggctacaacagaatgcaactttgagtgcacatacattttctaaatgctacttggattttatggattctctggggggaggggcaagaaacagatttgggagtcacccaggtaaaaatagcaccaccaggtacttcactgactggagaggtgaaagagtcttcgtttaccttctagataactggctacccttccttctatgctaaaacagtcatagctatttctgggaatagaatttacagaagtggatggcaggtgatgggtgggtcctgacgtttgctaactatatcattttcaaattcattgtgtaggcctgcctaaggtgaaagcctgatataaataactgcttagagcaggctctggttccctctttttaaaaatgggagtcacagtaacttgcactgccatggtcagcttttactgccaacttaacacagcctatagtatgtgatatatgcatacacacatacaatttagtacagttgtatgagagagaggagagtcttagttgaggagcttcctagatcgaattggcctgtgggtctatctgtgggggttgtcttggtcagtaattgatgcagaagggcctatcccactgtgagtagcaccattccctagccaggtggtcctaaactgaatagaaaactaacttaccataagcctgtctgtgagctagcaagcagtgtcctctgtgtttcctgtcacacttctttgcctatgaagtgtattccttgattgaaggtaatattgtatggaataagaagcaaaccgaccttcaagttcctgccttcagctcctgcctggacttccctcagtgacagactgtaacctggggttacaagctaaaatatacatctctttcccctaggttgtctttggtcagagcattttgtcacagcaacaaaacagaagctgtttaataatatatattaaaaagagcagagtacggaaggtagccagaagaacaagagtagcttaaagagccaggataatgtttgaactgtatttttaccctttccaagaaggtgacagcatagacgagcaaggcaaacattaaggcaaaaatttaaagagagagaaacgtgagctaaggagactcatgcacaggaaatctttattttaccttcactgcattttgatgtctagcggaacagagccaacactaagctgaatatcacataaaagaaacaaaatgcaaaaagcaaggcaaagcaaaacgaaaaccaagtgtctttaaaggcctaaggtactagactgtatctatagctgacagggcaacttgaacaacattaaacagcaatgatctttactaaagaagccgtgccatcacaacagcttctccagtgtttccctgactggctacagtgcggttctgtaaggtcttctgctggagttgcccagagactcctaagagcactgggagtgttctcaacatgttggtgaatggtgatttccttctcgatagacctgtcctggctttcccacaaagcatgtaaagggcttaaaggggaagcatcacagatgctctttagacctgggaaaacggctccatcatcaccagaaggctcctgctccaagcatgcctgctccaagtggaatcctctggacagaaaacccatagctccctccgagtgaacaattaggaagaaagaatatgatttcgtgtttcacctgaccacattttggctttaggcatcctgccaagaaatagagcaaattcttggttatcctaaaggtaaaatcaaagggtactcagagcttttctctagtgctctaggcaactagtttgggatagagacaaggacatgaaccttcccattccagactggatatggtgctgaaggtatgcagttacaactttaaggtagtctggagtgggtgggcagagaagacccacttcttgaggggaaaacatagtttcccaccgagtaacttttatgctcataatccttgaaagatcatttaaaatgagggaaatctcag

SEQ ID NO: 158 - DNA, 1611 bp, Mus musculus
gagcccaatggctaactatgaatttagccaggtgtctggggacagacctggctgccgcctctctaggaaagcccagatcggtctcggagtgggtctcctggtcctgatcgccttggtagtagggatcgtggtcatacttctgaggccgcgctcactcctggtgtggactggagagcctaccacgaagcacttttctgacatcttcctgggacgctgcctcatctacactcagatcctccggccggagatgagagatcagaactgccaggagatactgagtacattcaaaggagcatttgtttccaagaacccttgcaacatcacaagagaagactacgccccacttgttaaattggtcactcaaaccataccatgtaacaagactctcttttggagcaaatccaaacacctggcccatcaatatacttggatccagggaaagatgttcaccctggaggacaccctgctgggctacattgctgatgatctcaggtggtgtggagaccctagtacttctgatatgaactatgtctcttgcccacattggagtgaaaactgtcccaacaaccctattactatgttctggaaagtgatttcccaaaagtttgcagaagatgcctgtggtgtggtccaagtgatgctcaatgggtccctccgtgagccattttacaaaaacagcacctttggaagtgtggaagtctttagtttggacccaaataaggttcataaactacaggcctgggtgatgcacgacatcgaaggagcttccagtaacgcatgttcaagctcctccttaaatgagctgaagatgattgtgcagaaaaggaatatgatatttgcctgcgtggataactacaggcctgccaggtttcttcagtgtgtgaagaaccctgagcacccatcgtgtagacttaatacgtgaaggatctggatcttagatcacctgtagcctggactgagatgaaggggctcagaagcaacactggtggaaagctgaaactgtcagggagaagcctctactacagtgttaacaccagagatggaagaacttcccaattctctgtgtactaccaacattcaagaaaaattactccataaaccagagttaaacttctatattgttatattagtctaactttctcatgtggtgcttctgtattgtttatatattgcttacatccttttattcctcttttaatgatctctcttttctctctctctctctctctctctctctctcaatgaggctgagaatccaacctgagaactttcatacatggtggataagcctatataccactgagctaaatcctcagcacagctgataacatcatttttgctgaaaaatggccaatcaaacttcccattagacaaagaaagtcaaatgtcaagtatatcgaaatgaatgaccctttttttttttatgttttttcattcttcccacagatattcacatggtaaacctgaggtcatagggtcattatagggaaggtgctgtgtgggaactacccacgtgccctgtgctttaatctttaactcaacacgtccctgataactttgagcattcttttcttttcttttctttccttttcttttcttttcttttctttt

SEQ ID NO: 159 - protein, 306 aa, Mus musculus
SPMANYEFSQVSGDRPGCRLSRKAQIGLGVGLLVLIALVVGIVVILLRPRSLLVWTGEPTTKHFSDIFLGRCLIYTQILRPEMRDQNCQEILSTFKGAFVSKNPCNITREDYAPLVKLVTQTIPCNKTLFWSKSKHLAHQYTWIQGKMFTLEDTLLGYIADDLRWCGDPSTSDMNYVSCPHWSENCPNNPITMFWKVISQKFAEDACGVVQVMLNGSLREPFYKNSTFGSVEVFSLDPNKVHKLQAWVMHDIEGASSNACSSSSLNELKMIVQKRNMIFACVDNYRPARFLQCVKNPEHPSCRLNT

SEQ ID NO: 160 - DNA, 90435 bp, Homo sapiens
gtatactgttaatgattgtctgcccatgtcctgctgaaataccatgagtgttgatggacagtatcttttttttttttttttttttttttgagacggagtctcactctgtcacccaggccggactgcggactgcagtggcgcaatctcggctcactgcaagctccgcttcccgggttcacgccattctcctgcctcagcctcccgagtagctgggactacaggcgcccgccaccgcgcccggctaatttttttttgtatttttagtagagatggggtttcacctcgttagccaggatggtctcgatctcctgacctcatgatccacccgcctcagcctcccaaagtgctgggattacaggcgtgagccaccgcgcccggccgatggacagtatctttaataaaactgaatacagtttggcttggggaaaaaaaagccctcctgacagctgccacagacccgtacccaagagcatgtttccagaagttcccactatggggcataaatcccctttgagaacagactgagtctgtcaactgtaagcctttattttcacatttacaatatgaaaatcatcacatgtttacatgatggcagtgttgtgagggtacagttcacaaaggacctgacactcaacgatgttagcaattattgttgaaagaaaaaaaaaaacaagaattatgtatgaattccagcatctcccttttctcccttcaacattgtgccttatttctcagcaaatgagccaacagatgcttgttgatagatggttttagccggtgaatccgatgaagaccttggatctgttggtgaatgtccagcctgttgtcactgagtttgaactgtgggagaaggagctgcttattctgcaggcgttgcttgagtgccaaccacatactgggcatggttctggtgctagggacagagaacttggtatttctggtgaacaaaggcaggcaacggccctgttggcatggagctgcccttctagtgggggaactgaagagaggaggctcccccatttctagaagctttcccagggaaattggctgctttttgcttgacatgtacactcacatgttcttgcagcaagcctgagccacagggagttacatgagatgctcaggctcaaagagctagtgggggtggagagctggtattggagtctgggctctggtggtttgggagaggacatatggcctggaaggagccacgtatacacagtgaagcagaaagaacagaatttctctctctctatatatatatgtatatatatgtttacaatatcaaataatattttttaatcatttttaaagctaacaaagattaggggaaaaaaaggcaagatactaccaaaatgttagtggtagttgggctacgagtgggagcatttttcttctttgctctatttccacttttaaaatgtagttttttgttttttttttaaagacaatctccctctgtcgcccaggctggagtgcagtggcacgatttcagttcactgcaacttccaccacctaggctcaagtgattctcctgcttcagcctcctgagtagctgtgattacaggtgtgtgccactgcgcctggctaacttttgtattttcagtagagacgtggtttcaccatgttggccaggctggtctcgaactcttgacctcaagtgatccgcccaccttggcctcccaaagtgctgggattacaggcgtaagccaccgggcatggctaaaatgtgattttttttttttacttgaatgattttaaaatgactaatgaagttgaccaaagaaagaagaacatgtgtgctttttattctagaaccaatgtttctactaaccagctgtgtggcctggagatagtcatgcctcttgtccccaggtgtccccaaatctgttgttctccccgccgttctgtttatatgctgttccctcctttttgcaaaccttgcttgcccttcaacagcctgctgtggtgtcactgtcttttcaaaggcttcctaaaaactactccgggccaggtgtggtggctcacgtctgtaatcccagaactttgggaggccgaggcgggtggatcacctgaggtcaggagttcatgaccagcctgggcaacatagtgaagccccgtctctactaaaaatacaaaaattagctgggcacagtggcacgtgcctcccagctactcgggaggctgaggcaggagaatcgcttgagcccgggaggcagaggttgcggtgagccgagattgcatcattgcactccagcctgggcaacagagtgagactccgtctcaaaacaaacaaacaaataaacaaacaccactccgattccttctgattccccctgtttgctacatcaccactgcaatattaatgcttatttgttgactacttgctaggggccagacattcagctctgttccctatacacattacctgattcaactctcaaaagaattcaatgacggccacagatatttttcagcctgttcgacagatgagaaacttgtccttcagagaagctttactatttgcccaaatagcaaagcccacccaggtctacctgaccaccaagtgctcttaagtgctgggctatacagggattcctcaaggctagtttatttctgtgccctcaatacttaacacagtacctggcccatggtgggtccttaatatttgttgaataaatgaatatcagaatatgccatttttcaagcctcagtgcagtgtaactatgcacaaataagtctgcaataatgatattaccatatgttgagtgtctagcgtgttctaggtgtgtacattaccaattaatccgcacttcaagctgatgagtagacattgcactgcacctattttacagatgagaaaatagaaattaaaaaatattggtaacttgccccaaatcatactacagcaacagggtgtggtaggaggatctgggtagttccttgtgcattatcttcttccccccaaatataccacagtgttagacgtttgtagccaagcttcttgcctgcagaaagataaaatgcaaaatgagaatattcacaaaccaagtgatgtagcagaagtaaggggctatagggttcctttaggttttattttctcaagtgtttattacatttcacagaaagagaaactaacatctgaaggtgccaaatccctggtgattaataatcagaaaggaagacaaaacaaacttgaaactgtaactgtgtgagtgtggaaaaacccacattctcagctaccgtcagtgagagggccaactggtaccagcctttggctggcaatatctttccaaattataagtgcttgtgtcttttgacccaggaagtccacttttaggagtgtatgtacttggacacctaaaaaatatgctgccacaagaacatttgttgtagcattctgtgctcatttatacaggtctagttaagtaaactctagcatactatacagtagaattctaggggtcatctaaaagaattgggtaagcaacctgtgctggtgtttaatgtcttcaacatacattagtatgtgaggaaagccaggtacacaacaggatatgtcctatgctataatttttatgaaacaatgaaggtctctctctctctctctctctctctgtatgctgcttgttcattaaaatgggaagaggggagttcagggaagaagaaagaattgttttctgaatctagccctttgatctatttgacatttattccacgtgtgtttatcatatttattgtcagaaacaaatagccttttcaaaggggtgtgttttgtggcaggactcagatgtttcatttcacaagctggaaaactataattcctaatggttcagtttcataaacagcaggtggcaaaccttcttgcatggtaactgattttgaaccttgcactataaggatcatgaaagaaagtacatgcccagaacaagagagcagaagaaaggagggaacacagcaaggtcagaaattaacagaaatgaatccagaggcaaaacccacatttctcagtcattcactaactggtttgttcaaccagcatttatagacatcagattgatcccagggtactaagagaataaatttcaattgctgccaacctagccttgtgcaaactcctggtctcctgaggaggggacacccagaagaaattctcagagtgtgcattcctgggctagggggtccagaccagagcctctgagatgggtattgtctcaggagatctgttggcatctatgttattcagcgagaagagtgtacaacaatttgcagatcgaacctagcttgggagctgagtggggttagaaaaggcttcctgaggatgtctcattgaagctgaaacatgaagggtcagtaggagtcagcagggtgagggcatggcatctgtgaagtcccagaggcagaggagagcttgggctggttggggacagagagaaggccagcaggagtggagaagcataggagttgttggggacagaggtgcgcacgcaccatggaggctggagaagcagacgtgggccaacagacaggctgcttgtcatgtccagagcaagaggggagggagtcagaattatgttgtaaaagttatatctttgaaaggggtgacttggaaaaaaaaccccaccaacctgactgtggtatagacaatacatggaggaaggcggaaagagtggaattgggagaatggtggggaagctcttcctgggtgagaaaggaggtgaactttctcttggactaagttagtggcactggagatgaagaaatggatatttaatgaataatttgcaggcagtaggaactgtcgttcatgtggatatgtggaacgagggagaggcaagagtcaaagactgggaaaattctagcttgagtaactgcaggagatgttggttcttttcactgaaatgcaaaagaccagaagaggagctggtttgacagagaaagattaacagtttagttttggacagaatgagtctgcattgcctatgaaagcactcaaatgcaaatgttgtcttttctaacaactctttggtcccttcaggacctcccagccatgagctctctcatcttttcgtgatctctcacccttcttttgcccccgcttcagtttctgtgggacttagatgttatggaccattattaaaatcccatccttgaggagagtggatggcctgaatccaggagtttgaaatcagcctgggcaacatggcgaaaccccatctctacaaaaaaaatccaataagttgtggtagtgcacatctgcagccccagctactcaggagactgaggcaggaggatcgcttgagcccaggaggttaaggctgcagtgagccacgggctcagcactgcatccagagcctgggtgacagagcaagagcctgtctcaaacaaaacaaaacaaaacaaaaacaaacaaacaaaaaccaaaaacaaaacaacccataaaaaccaaaaacaaaacccattcttgcttaaagtttctacttccctgacgtttttttctccgttatatttactggtgttaggggctgaatggtgtacaccccaaattcatatgttgaaatcctaaccctcagtaccttagaatgtggctgtatttgaagatagggtaatagcttcaaaaaggtaattaagttaaaatggggtaattaaagtgagctcaaattcactatgactggtgttcttataaaaacaggaaaattggacacagaggagttcaccgggaagaccacgtgcagacagagtgagaagacagccacttacaagccaaggagagaggcctcagaagaaatcagcctggtgacgccttgatcttggacttctagcctccagacctgtgagtcaatacatttctgttgcttaagccaccccattgtggcactttgttatggcaaccctagaacacaaatacacacagcaaaccccaaccctgtcaaatccaactctgctcactttcacccttctgtttaaacagtggggagtggctgggcaaaagaacgcaacctactaaccgaccttttaaaaaattcctgaccacttgatgataccctgagaacccacagtccatttgctctcctggtctccttccaggtctaccagcaccccaccaactctcagaagatgaccttttcttctcatttcactgagaagcagcagaaaagtacatccacatcatcatcaccaaatccatgaacctcccaacccccaaagctgtgttttccatctttcttctgtgaggtggtggagctcctacccacactctcacctgtgcttcggatacctctcaccaatatatgagtccaggagttcaagaccagcttgggcaacatggtgaaaccctgcctctacaaaaataaataaataaataactgcaaaaaattaaccaggcccatggtggtgcgtgcctgtagtcccagctactcgggagactgaggcaggatgatcgcttgagctcagcaggtcaagggaaattactggagcaattgccaattgtcgcctgcctactgggtcatcccagcatcctacaaacatactgtgataatctcaacttagaacaaaatattctctcctgactgcccagcatcctctagctatggctttatttctcgatttcattttacagaaaagctctccacacacacgcaaaccccagctaacttactgatatcacttatcttctcacatactctcctaaacctgctgtgggtgggctttgtcctcatctttcctctaaaatgattcctcttgtcactatcatcaataactttcagggcacccttcctcttgtctcagggatcatccttcccagttctctttgctgaagctctctcatctttctggcctctgtcacaggagtagcccatggctgagactctgaaactcttctgtttctgcacacactcttcacatgatcttatatatacactcttggctttaagaactgtccatatctaaggtctcccttattagtgtctccagcattaatcccttgcccaaactccagaagcttatacccaagtggctccttgatgcctcctgttgggggtctaatagacatctcaaacttagcacatcaaaaaccaaattcttgattcatgcctcttcccaagaccaaatctacttcacctcccgttttcccatcactgtagattgcagtgctttccttcctttggtcagttacacaaataaaaaatcttggcatcatctttgactcatctctttcttgcaaatgctacatccaattcatcagcaaatcctgctgctgctaccttcaaactctattcagaatccatctttttttttctttgccaccttcattactgctactacagccattgtaactgttctccatccttatcctcctacaatttattcttaataccaaagccagattgatcctttaaaataatatgccagatcaagtcatttggtgacttgtatgggtaaaaataaaatgcacacgaatgggttaaaaataaaatccaaaaacaggcacatagaccaatgaaacagaatagagatctcagaaataagactcacatctacaaccatctgatctttgacagacctgacaaaaacaagcaatggggaaaggattccctatttaataaatggtgctgggaaaactggctagctatacgcagaaaattgaaactggatcccttccttacacctttttcaaaaattaactcaagatggattaaagatttaaaatgtaaaacccaaaactataaaaaccctagaagaaaatctaggcaataccattcaggacataggcatgggcaaagatttcataatgaaaatgtcaaaagcaattccaacaaaagcgaaaatgacaaatgggatccaattaaactcaggaacttctgcacaccgaaagaaactataatcagggtgaacagacaacctacagcatgggagaacattttcaaaatctatccatctgacaaaggtctaatatccagaatctacaaggaacttaaactaatttataagaaataaacaaccccattaaaaagtgggcaaaggacatgaacagatatttctcaaaagaagacatttatatagccaacaaacatatgaaaaaaagctcaacatcattgatcattagaaaaatgcaaaccaaaaccacaatgaaatatcatctcatgccagtcagaatggtgatcattaaaaagtcaataaacaacagatgctggtgaggttgtggagaaataggaacacttacactgttgatgggagtgtaaattagttcaaccattgtggaagacagtatggggattcctcaaagatctagaaccagaaataccatttgacccagcaatctcattactgggtatatacccaaaggaatataaatcattctgttataaagatacatgcatgcatatgttcattgtagcactattcacaatagcaatgacatggaatcaacccaaatgcccatcaatgacagactggataaagacaatgtggtacatatacaccagggaatactgtgcagccacaaaaaggaacgagatcatgtcctttgcagggacatggatggagctggaagccattatcctcagcaaactaacacaggaacagaaaaccaagcactgcatgttctcacttataagtgggagctgaacaatgaacacagggaggggaacaacacacactggggcctgttggggagagtggagggagggagagcatcagaaagaatagctaaaacatgaggggcttaatacctaagcaatggattgataggtgcagcaaaccaccatggcacacatttacctatgtaacaactctgcacgtcctgtacatgtatcccagaacttaaaacaaaataaaaaagataaaaaataaataaaacacacagtccaaaaagtcatcctgtcttacagagctatgggtgatctggtctcctgctactttccgaacttctgttctgtttccctcaaccctctagcctaactacaattggcctccttgctgctctggaacaggccaagagcttttctgcctcagagtctttgcacctgccatttcctctgcttgggaaatgtttgccccaagggagttgggtgacttgatcgctcacattacttaggtctctgcttgaatgtcacagatgttctcttaataaagaagaggcaagaaaagccactttattatttattaaactcccgcatagagtgcagtattattactgtgtgccagaccctgcttcaaacacattccatggactataaaattgcatctctgagcagctcctagagctggtagtaacaacttacatttactgggtgattaccatgtgccaggtattgtgctaaacacgttgtagatattaactcacttaatcctcgtaacaatcccatgaagtaggtactgctactatcccggctttacatctgaagtacagagaggttaagtaacttgccccatgtcatccagcaagaactaaatttgaacccagagcttagccactgatgcctcttgagagaaggagtcagacttaagttgagtctttaaaggtggttgaccaggcatttgtcagagttaagaaagagaggtaggacatccttttccaggcagagggcattgtgtgcacacacgtatagaagcaggcagcccaccctcatgctttccaggaagcaaatgtggctcaggtgtaaagtgcccggttgatgaagggagttagcggagggagtataaggatgtactgtctgcccccttaggacacctgcagaggattaaggtggctgtttctccctggaggtggagtgggtgggtcactgcacaggagcctatagttgttggtcttttaaactcttattggtgtaaccagccacggaactctgaggcaaggggttgggggtgggaagggaaacagagaaaaggcaagtgaaacagaaggggaggtgcagtttcagaacccagccagcctctctcttgctgcctagcctcctgccggcctcatcttcgcccagccaaccccgcctggagccctatggccaactgcgagttcagcccggtgtccggggacaaaccctgctgccggctctctaggagagcccaactctgtcttggcgtcagtatcctggtcctgatcctcgtcgtggtgctcgcggtggtcgtcccgaggtggcgccagcagtggagcggtccgggcaccaccaagcgctttcccgagaccgtcctggcgcgatgcgtcaagtacactgaaattcatcctgagatgaggtgggttggcgactaaggcgcaccggtgggcactgcggggacagcagggccccgcgcgcagggaagccgcccggatcgcccggaaccgggcatcttccgtggcgggtcagccgagagcccgccgggtggtgctgagtagggagtcccgggctcggggctccgcgggccgcttgcaggagcagctggccttggcaccgagcgtgcccgcgggaggcgggggggggcgctgctcggtggctctgctgcgtagccggtgaacacttggcaccgatgcccgccttctgggcaaggtgccctgagcccagcccctcgccgggctgcagcccaccctcggcgcgctcagcccgcttcaccgcttcagggacggaatagaactcgcagatgcagggtgtcgctgacattttcaactttttctgcggtttccgcccgctgtctctgacccgaaagtgcccccggacggttacagaggacacttaagtggtttgcaaagcctgtggtaggggaggagggtgtagaagggccaaaccacggaacttagttttattcatttatataaagcagcactccgattctttttgcgcggcctgaaatgcatgtgaccagagaagtaattaacaaaacaatgtcaacttctaaaaccgagacattacttagatgataaggcgcagcaactcggtgaatctgtacaaaccttggaaaaaaaacacattagtctatgggaccttccagttttctcatgctcctttccagctactaacctctcctaaagggaacaaccactttttggatttgattcccaggcctcgctttcaccgggaaattatcgttgcttgtaaaacagaagaagccgggaaggcaggcagggggagctgctactttacactctgtgctttgggatagcaaaatcccgcatttaagcaatccgaggaaacgagcaaatagacctccctcgcctctccgagcacactcaacagttccggttgcaaaatgtttgcctcctgggcttcccagcgtcccgttagttgttctatttacacataattagatacttaatggagagagaaactagaagttgaggcgttcctccaggctgtattgtaaagtatgaagtgaaatccaaaatgaaatggtaatgttagaaagcaacctcattaaaaaaaaaaaaagtaacactggtcttgaagatctttcaatgtgagtacataaagatctatctcatttcttttgacagcccatagtatttcataaactagatgtaaccatttcctattgacaggaaattagcttgtttccaatttttcaatcccattcattcatccaacaagtatctgttgagcacccactatgttccagacagtgatctagctactgatgacacaagagtgaatgacgaagttctcactcatgaaattttcaccttagttgggagaaacatgatgcaatgaaaatcttcatacatacattgtgtgtacatatgggagtatttctgtaggatagatttctagtgatgaaactgctgagtaaaagggagaattatgcatattttaagttttgatttttccaaattccaggtattccatatatactccaaaatagttgtgccattttactctcccatcatcagtctatcagaggggatgctttcccacaatctcttgaatgctgaatattttcaacttttttacttaagagaaaaaagagcatctaattgttccctcagtatcagtgagtctaagcatcttgtatatgtttatttgccatttatatttttttctgtgattttcctgtccagatacttgatactttctattgagctgcttatttatttcttatgggagatttttatatattttagataatattctctctctcacacacacacgcgcacacacacacacacacacacacacacacacacatacagtcttacagccacatccctgaaatcttgaccttgtgaacatgttttactggcagcactctggactcgatcattgccttgagactatttcttttttgatattctttggaaagactaacaatgacagttttattttcaaacccaacaaatcctggcatggaaatgtttgctcttgattctgcttttaaaaaaataaagaattattttctctctttctttctgcaccttatcagaaacagctaaaagaagtgagttgggccaggcactgtggctcacacctgtaatcccagcactttgggaggcccaggcaggtggatcacttaaggtcaggagtacaagacctgcctggccaacatgctgaaactccgtctctactaaaaatacaaaattagccgggtgttgtggcgcgtgcctgtaatcccagctactctggagactgaggtgggagaatcgcttgaacccaggaggaggaggtagcactgaaccaagatccagcctggccaagagagtaagactccgtctcaaaaccaaaccaaaccaaaccaaaaaaagaagtgagttggcactttcaacattctgcctggaaatctccttaccaaacctataagatcattaggtatattttctgcactttgtattgtgacaggtgacagtgttaccaaactttttaccaggacataatagggtctgcctttcttctagttgctaacaatttcccccaagtccatcttgcctgcactaacagtctcctttagacctctcctctcctgcctgtcacacattcctagtactaatgctacagtatagtagtaagggtctccagagaaacaacatttatataacataatataaatacattaatagagagaaagagattttaagaaattggcttatatcattgtgaagtcgggcaagccccaaatctgctggacaggccagcagcctggagacccagggaagagttgatgttgcagctggagtccaaaggcagtctctggcagaattctcttttacttctgggaccttggtctttctcttaaggccttcaactgattggatgaggcccaccacattatgaagggtaacatgctttacaccgagtctcctgacttaaaatctaaaaaataccttcacatcacaactagatgtgtttgaccaaatatctggataccatgcctgggcgaattgccacttaaaattaatcatcacgtacatgttttaaggttttgttacacaagacctcacttccaagtatcactttctgttttggtcatcagttgctgcataataaacaaccaccctaaaatttagtgacttaaaacaacaatcatttattgtctgccatggttctgtggtttgactgggatcagctgagtggcctgtttcacttggtgtcagctgggggtgtaggcatctgcaacattgtcttggcaggaacatccaagatgtcccacttaacacgatggctcctgggctcagctgggctggtcaggcctcccttcctctctgtgttgccacacggcctctctctatccatgtggcctctccatatggtctctccctggtggaggtgaatttcttcaaggtttctaaactctcaaaagtggagcctggcaagcccactcaaagcttcagatccacaactggcacagcttcccttccacagattctataggttaaaacaatcaccggaccagcccagattcaaaagaaggagaaacaaactccacccctccatggaggaagtagcaaaaataatgtagacagtttttaccctttacatctggatttgttagcttttctgttttcattttcttctggtctttcttttgtccttctcttacacttattttattaccttttatcaattagcttttaagatgataaaaatctaatacatgcctcctggaatgtcttcttgagcctagggacttttgtttaatgatatatcttgaggacctagaatagtgcctgaaatacaatagtcattaaatatttagctgaattaaatgaatggtatataagccagggtattaaaaataacataaacaaagttgtaataaatatacttccccagtgaacgacctaataccattactccccaaaccctcaatttctgtcttgagcatagaaactgttaatttttcctttgtgtagtaggtccttagtatttctttagaggttgtagcactttatcttcctcactgttccttttccttggttgtccttttccaaacatctctcaacaatttctcccaagtccatcttgcctgcactaacagtctcctttagaactcccctctcctgcctgtcacacagtcttagtaatagtgccacagtatagtagtaagggtctccagagaaactcactttctgcaagttttttagtgtgggtaggtgagtattgaagcttgttcttggcgttaccaggttggttctttgagttgaaccaggggcattacatgcggaatattcctgaacagatcacctctggttctgctgtctcaagggccacacacaagagctgccttctgaccaagatgtctctgggcacatgagacctgaaatacacatggccaagactcaacaaagcgtttgctgactgtcagagctgacagcatctcggtactgtgggagggagcccagtgtctggtgatagtcaggacggacccaggtgatgtcaggggtggggtggggcctgcaggagggaatggagagccagcacctaggggaagctgggaatttaggaagatatccagagagtgtaacttcagttccactaatctcacctgggtgaaaaccagccctctccatggatgatggtgattgcaggtactgacgatagctgcagactgctggtggtctaggcaagcatgcagggatgggagcaggcatttctgagagctccccttatccctgccccaagacaaggtgggggccctgtggggaaggactattttattcacttctgcatctccagttgtctaacacattgcttatcacctaacagtctcttaatagaagcttgctatattgagctgccttgagtccacatcatgctggttgaacataagtagaaattgtgggagacttaatcagagaaaatctttcatctgtcttaccttacgttctaatgatcacttctgtgcccacaaggaccatcttttctgattcatgttcatgtcgatttcttttttatttaacttcctcttcaaaatttctggcaggatttcttgggagccaattctccatttttacttccccatgcctcccattttaatgactgtaggattttctcagggtctactcagcaaaacttgttagtacaacatgagcaaaacagcaaatttatgcaaacacttagcaaagacttagctgtctgcctaatgctagggtgagacatgggagattcacaaatgaagaaacacaagcattgatctccaggatcctgcagtgggaggtatgcggaggaccaacctgggaacagagcaacgcaacaccatgtgatctgtaatgaaaaagaggcctgtacacagccaagaggtcactgaggaaggagccattgcttctgtgcagttagtgctgcgctagattctgcagggatgtaagaaatgtacccctatcaaacaagaaagactatgtgaattgctgaatatgtgagtggagtaccagcacaatgccatggagatgcagacgtgccccatgtggtggggcagagtcaggaagcactttaagaaagaaatagcatttcaggtcttcctttaaaggtagaatttcaacaagagggtgctctggagagtgtgtgttaccctgctgagaaaatcctggcggtcaggtaagatgctactgccagggaagattggccaattgattgactaaacccttaaaggtttggggatcttggggaggattctgctggtgagagggtctggacttcctcttggtctgtccacacctggaccttctcagcacacaagagactatgagggtgaccattttgcacaggacagaattccagcatgtttttcccctggagtgatggaatgaccacctgctcaacatcagtgtcctcactgagaccatgagattcagtagagtgctggaaagcttcatgcttacctgtgtcttctcaatgcttagtgttatgattgaaggcttccttcagtcctaccttttgttctggggttctaagaatcttaggtgcaggcgaggcatggtggctcacacctgtaatcccagcattttgggaggctgacgtgggtggatgacgaggtcaggggattgagaccatcctggcaaacatggtgaaaccccgtctctactaaaaatacaaaaattagccgggtgtggttgcgtgcacctgtagtcccagctactcaggaggctgaggcaggagaatcgcttgaacctgggaggcggaggttgcagtgagctgagctcacgccactacactccagcctgggtgacagagcaagactctgtcttaaaaaaaaaaaaatctcaggtgcacctgagacagattgaatgtggaaggggaagtgaaacaggccttccaggtgtggggcctgggtgctgctatagttacaattggggaagtgagactataggtctcagttacctgtggaaggaagggtagagtggagtacttacgcaaattagctaattctgggagcttggggtgctaccagggtatcagggagaatacagccagggaatagaatcttcttgaagcaaaggctgtttggaagcccccagagtggatgaaaaggctcagtgggaaacaacagatatcaggagagggagaagaagatacctatttctataccttttggccttgtgttttgcttcagacactgttcccagcaaggtcagtggaacccactgctcaaaacacacacttgctccttgttctggtgtcataatagctctgcaagcagtggtggtgttcagcctggagaacgttccttttctttttttttttatcacaataaacactcatggcttctctgcttcttcctttcttctttgtcttaggactcttgaaaaacagctgccaaatgtcagtttagatattttggagggaaaaaagttgggaatcaatgtttacaggttgcctgcaatgtgctggaaactacatagttggttctttttaaactttctctgaatcctgtcaggaaagttccagcaatcacatcttagtgggtccggaattcgtgggttcttggtctcactaacttcaagaatgaagctgtggaccctcgtggtgagtgttacagttcttaaaggtggtgtgtccagagtttgttccttctggtgttggacatgttcggagtttcttccttctggtgggctcgtggtctcgctggcttcaggagtgaagctgcagaccttcacggtgagtgttacagctcttaaggcagcgcgtctggagttgttcgttcctcccatctggagttgttcgttcctcctggtgggttcatggtctcactgtgctcaggagttaagctgcagactttcgtggtgagtgttacagctcataaaagcactgtggacccaaagagtgagcagcagcaagatttattgcaaagagcaaaagaacaaagcttccccagtgtagaagtgtagaacgggacgccaatgggttgccagtgttggctccccccagcctgcttttattcccttatctggccccacccacatcctgctgattggttcattttacagagggctgattggtctgttttacagagagctgattggtccgttttgacagggtgctgattggtgcatttacaaaccttgagctagacacaaagtgctgattggtgtgtttacaaaccttgagctagacatagagtgctgattggtgtatttacaatcccttagctagacataaagattctctaagtccctagtagattagctagacacagagcactgattggtgcatttacaaaccttgagctagacacagggtgctgattggtgcgtttacaaaccttgagccagacacagagtgctgattggtgtatttacaatcccttagctagacataaatgttctccaagtccccactagactcagaagcccagctggcttcacctagccgattgtgcaccaagtcagcaggcggagctgcctgccagtcacctgctatgcacccgcactcctcagcccttggacggtggatgggacgccagggagcagggcgcggtgctcgtcggggaggctccagcggcacaggagcccacggcagggagggtggggggaggctcaggcatggtgggctacaggtcccaagccctgccccgcggggaggcagctgaggcccagcaagaattggagcgcagcgccagtgggccagcactgctgggggacttggcacaccctccacagctgctggcctgggtgctaagcccttcactgtccggggcctgctgcgctcgccggccgctcagagtgcggcctggggagcccacgcccacctggaactcgcgctggcccacgagcgcctctctctctacacctccgcgcaagcagagggagccgactccggcctgggccagcccagagagggtctcccacagtgcagctgtgggctgaagggctcctcaagcacggccagagtgggcgcgcagaggccggggggcactgagagcgagcgagggccaccagcacgttgtctcctctcattagggttggggaaatggaccctgagagagattaagtaatttggtgatattctatagtcactctggctatgtaatttatggagcctagtacagaatgaaaatgtggggctcatttttcaaaaagcaggaaacagcttttcctttcttccagggtctcttcctccacctgccatgctggtgtttggttgctatttaatgttgagccctcttgggcacagggatacttgcagggacagggtgtctgctcatttttctgtagacctcaaaggtgagtcctgaggcttcagggtcactggcctccttttagggagtcacgacgccttgtctttgtacttcaggaatgattacgaatctttgtaggtaaagcggcagaatgccacgtcctctcctggttgccaggacgtgttccttgtggtttaattgccgggtctgccctgcagaccctggctgagcgacagatgaaaggagtactcagacacaggtacgcagtgaaagagcggctaggggactgccgaagagtcagcagtctcgataaactggagctgctcacttttattcagtacagacataatgccgaaagcctggagccaacgcaatctgtgggtaattaacattgttgttccgccgtgcagggagcagtctcgccagaggatgatgaaaggttggtttccggaagtaaacaagcttatttagacaaactcccctacattcccttgtacccactcctcgccctctgcgtcagggtaagagaacagctgccttcagcttattctcccccgaagctttgcagagccttctgacctttcaaaaggtcttcttctttccctatcggttctcccactactctgactgatctcctatatttgatctcaccttaacaatcacttcttagagctgggtcaggaagtatgcagcatgcacctggcactcctagtactgtgcccatgatgggcattgctgattgttcagagcatattggatgagcctggttcagcctcagaatcttccacccagtgcaccatggagatgctaccaattggttggagttgctctgagaggtgacatttccttgtgattctgcattagaaacatgttgtttgtcagccgaaacagggaaacctgacacgttatccgcccccaggaagatcccatcatcattccatgcaccttcagtcctgggagcttactttaaaaaaaagtgactgacatatgagcgcaggtccccaaacagaggggaggcaggatgagaagccagatgaagagagtcaaggtcctggggctgcttagcttggatgaatctgatgggaggtggggtgcatctgagtgttctctgctgatgaagaacagacttgttgcacgggggtaggtgtgtgctgtgtaaacacacatcagaatcaggaccccgaatagtgaataggcaagagtaacagctgaatttgcccagctcatcacaatttaacatcagttttcaaaaaggtaagagcgtggctttcatagcatgcagaatcaacacacatcaaagattgatttactcatttatgaaggaatcagcaaaatgacaaacttagttcagagaatattttgaggctctgagtagatataaaactggttaatgtttctcagggcaataaaaagctataaacgttggggatttcttttttatcagacagaaattatttgcatacttaacagaaaagatctccaagttaccatctaacttcataaggttcgaataaaacttcatagagttattaatgaatggtaaatagaaaagacaaatatatgttttaccagataattaagtaattcttggtaaacctggcaaacagtaccccagtgtgactctgaaaagacatgctgcccatctttttgccttatttccacgttttgggtatttttgtaagatatctattcaataaatatgtattgagctcctatgatgtcccagaaactcttttagatcctggagatatagcagtaaacaaaacaggtgaaattcttgctcacatggaacttatattctagtaggggagacagacattgaaacagaaaaatacatagtatggcagatggtggaaagtattaaaaagagtgctgtgtagtgtttacaacttactcatttatgaaggaatcagcaagatgataaactcagttcaaagaacatcttgaggcaccgagtacatttaaaagtggttagtttctcagggcgataaaaagccataaactttggggatttcttttttaggtatggaaacctaaagtaaagaagatgctatggtttgcacatttgtcccctccaaaactcatgtttgaaatgtaatcccagaagtggcaggatgagagattggccctttaggaggtgactgggtcatgagagatctgccctcatgaatggattaatccattcatggattactgattaatacgctaatgggttaatggatcaatgggttatccttggaatgaaatggcaggctttacaaggagaggaaaagggacttgagctagcatgctcaccctcctcaccgtgtgatgccctgtcctgcctcaggactctgcggagttctggtaagcaagaaggctgtcaccagatgtgtcccctaaaccttggactttttggcctccataactttaaggaataaattcatttttaaaataaattacccagcttcaggtattctgctataagcaacagaaaatgactaaaacaggaggctttactggaaggtgtcctcttagcaaagacctaaagaaagagggagagtgaaacatagaaatatctggggagaacatcctaggtaaaaggaacagcatgtgcaaaggccttgaaaagcagcaagccgctctccctctccctctccctctccctctccctctccccctccccctccccctccctctccctctccctccacggtctccttccacggtctccctctgatgccgagccaaagctggacggtactgctgccatctcggctcactgcaacctccctgcctgattctcctgcctcagcctgccgagtgcctgcgcacgccgccacgcctgactggttttcgtttttttttttttggtggagacggggttttgctgtgttggccgggctggtctccagctcctgaccgcgagtgatccgccggcctcggcctcccgaggtgccgggattgcggacggagtctcgttcactcggtgctcggtggtgcccaggctggagtgcagtggcgtgatctcggctcgctacaacctccacctcccagccgcctgccttggccccccaaagtgccgagattgcagcctctgcccggccgccaccctgtctgggaagtgaggagcgtctctgcctggccccccatcgtctgggatatgaggagcctctctgcctggctgcccagtctggagggtgaggagcgtctctgcccggccgccatcccatctaggaagcgaggagcgcctcttccccgccgccatcccatctaggaagtgaggagcgtctctgcccggccgcccatcgtctgagatgtggggagcacctctgccccgccgccctgtctgggatgtgaggagcgcctctgctggccgcaaccctgtctgggaggtgaggagcgtctctgcccggccgccccgtctgagaagtgaggaaaccctctgcctggcaaccgccccgtctgagaagtgaggagcccctccgtccggcagccaccccgtctgggaagtgaggagcgtctccgcccggcagccaccccgtccgggagggaggtgggggggggtcagccccccgcccggcagctgccccgtccgggaggtgaggggctcctctgcccggccgcccctactgggaagtgaggagcccctctgcccggccagccgccccgtccgggagggaggtgggggggtcagccccccgcccggccagccgcccagtccgggaggtgaggggcgcctctgcccggccgcccctactgggaagtgaggagcccctctgcccggccagccaccccgtccgggaggggggagggggggtcagccccctgcccggccagccgccccgtccgggagggaggtggtgggggtcagccccccgcccggccagccgccccgtccgggaggtgaggggcgcctctgcccggccgcccctactgggaagtgaggacccctgtgtccggccacccgctccgtccgggagggaggtgggggggggtcagccccccgcccggccagccgccccgtccgggagggaggtggggggatcagccccccgcccggccagccgccccgtccgggagggaggtggggggatcagccccccgcccggccagccgccccgtccgggaggtgaggggcgcctctgcccggccgcccctactgggaagtgaggatccctctgcccggccagccgccccatccgggagggaggtgggggggtcagccccccgcccggccagccgccctatccaggaggtgaggggcgcctctgcccggccgcccctactgggaagtgaggagcccctctgcctggccagctgccctgtccgggagggtggtgggggggttagccccccgcccggccagccgccccatccgggaggtgaggggcgcttctgcccggccgcccctactgggaagtgaggagcccctctgcccggccaggacccggtctgggaggtgtgcccagcggctcattggggatgggccatgatgacaatggcggttttgtggaatagaaaggcgggaagggtggggaaaaaattgagaaatcggatggttgccgggtctgtgtggatagaagtagacatgggagacttttcattttgttctgtactaagaaaaattcttctgccttgggatcctgttgatctgtgaccttatccccaaccctgtgctctctgaaacatgtgctgtgtccactcagggttaaatggattaagggcggtgcaagatgtgctttgttaaacagatgcttgaaggcagcatgctcgttaagagtcatcaccactccctaatctcaagtacccagggacacaaacactgcggaaggccgcagggtcctctgcctaggaaaaccagagacctttgttcacttgtttatctgctgaccttccctccactattgtcctatgaccctgccaaatccccctctgcgagaaacacccaagaatgatcaataaaaaaaaaataaaaaaaaaaaaaagaatgaatcaagaaaaaaaaagaaaagaaaagaaaagcagcaagccagccagtgtgtttggaatgttctcttatggaaaatttcaaagatatgtaaaactagggctaataatacaattaacccctacttacccattacccaacttcaacaactatcaacattctgctgttcttatttcatctatttacccattaaaaaaaaagtgtactttaaagcgaattccagagtttgtataattttgtctgtaaatctttcagtctgtatctctaaatctttcagtctgtaactctaaaaagaacattaaaaaacacaactatcataccatcatcctacctgacacaactgagtaatttttcatatcatccaatatcgatcagaagtttaattttccatgattttctttaaaatgtagttttataattgatttgttctaatcaagatttgcacattgcattaaaaatatatgtatcttaaatttcctttaatttacaaccatttccctcccccatttaagagtgcatattaatttattaaacagactgggcaattcatcttgtagaatttcccaccttctgggtttggccaattacatccttgtggtgttatttaaaatcctcctctattccctttattatctgttgactgacagcttggccaatcagaatcacttgaacgagctgattacaccccctctttctgaaacgttttcttcccttgagtctgtacacactgttggcttccaaatttatatctccaacccagacctctctccagtacttctgcttgctactgtgtttttcataactttctgatttttttagtatccaatgctagaaaatatatccattttgagaaagagacaaagtatgagctcatattgataatttcatttcaaagtaaagggaacaaagtttttatttaacatgttaattttatgcttgtttctcttttacactgaaaatcttagttctcaatgacattaatataattatgtatttacttcccatatatatgttgtatataattgttttatatatacatatgtgcatatatattattgctaatgaaacgtctactgaatgatgtaagttttctctgtgattcttttggtccttgggacacaggacttatcccactagtgatgtgtagtcaaaatactatgtaccagtgtttgataccttaattaaaggatctctctggctgctgcattgagaacagatggtagcaggacaaggacatcagcctggaagccatctggaagctctttagtgattcagataagatttgattttggcttggatggtgatggatgatgttgagaagtgggtggattctggatatgttttgaaagtaggttccatgtgatttgccatgggctaatatatggaatgtgagagaaaaagaagaaacaacaatgcttccaagattttggggcagaggtactgaaaaaatgaatttccatttatcagaaagagaaagactgtggtaaagcaagttgggaaggaaacagcagctcagttttccacattcagtaaccctcccttatctagggtttcactttctgcagtttcacttatccatggccagccacagtctgaaaatattaaatggaatattccagaattaaacaactcgtaagttttaaattgagcactcttctgagtagcgtgatgaaatctcatgatgtcctgctgtcttctgccctggatgtgaatcatccctttgtccagcatatccatgctgcatgttgtacctgcctgttacttgcctaagcaagtggatggctacttgcttagtgtccatctcagttatcagattgaaaaagcagtacatatacatagggtttagtactatctgcagtttcaggcatcactgagggggttggaacataaccctggcagataagggagactactgttttagtggagatgttgaccagaagactggttcatatgaatatgggggtcctggagagaggtctgggctggagatataaatttggaaatcaacagcgtatacagacacaaggaaagaaaacatttcagaaagagggggtataatcagcttgttcaagtgattctgattggccaagtaagatgaagattggaaattgaccaatggatcggtgacttggcaaggtcagtttgggaggagtggtagtgatgaaagcttatgtggaacaaattcaagaaaaaaacagaagagagaggaattagagattgttgtgcacagacaactcttgcaagaggttttgctggccaggggaacagaaatacaagtgaagtagtggctggatgttttccaaaacatgaaacttagttttcataggaaaaaaatggtttttctttttctacttattcaattttgtgcacaatttcattacattatataagtaaaaaccacaagcacgaacatgtttataaataggtaaataaataacaaagtagatagaaacaaaaattctcaggtgtgcaaaagagtagtttattagctgtgtagaagacagaaaacttgcttttatagagggaatgaatagtgttgattagtatagtgagtcagttaaataggtatcagttgaattttttgagacaataagtacatttagaattggctaggcattattcttccattaaaggaaactcttagtaatagattaggtcagaaaaccacaaagacagttttcttgaataagggggtggtgggaaaaaatggatgtaagatgctgagaaaaaacaggaaactcaacaatagatgaaatcaagaattagtttcgtgtgtgtgtgtgtgtgtatttcacagaaaagggctgaaaggggaggaatggttatattcacagatttttgtagttgatcttaatagggaataggagattacctttttttcagcaaaatattaccagcaaatgtctactctggaaatagaggataagaatcttctatttaaagaccaaaaaggtgaaaactgaggtcagaaatttaaagagtaaatgtagcaagatgctaacattcttgttccctctaataactcttcttttttaaaaattataaaagtaaaacatgcccattgaagaatatttggatgaatacaaaaatatagaaaagaatgtaaaatcgcttaagcccccaagtagaattctaaatagcggagaaacccacgatttaaaaaaataaataaggagatccacaaaaggaagatatatacctgcttaagtggacggcctcagcataagtagtcttacagttacaattaattttttttctattatacgatgttttaaaaaattgctaagctcagttgtctactccctgctagaatgtatcaaacatgctgcatccacatagtagacagttattctacatttttggtctttggatgttttgaagcaattagcaaagtttgatttgaagagacattataaatttccgacggcatatttttctctggccatgatccatatttgccttgatattgtccaaatgttcattttatcttatgactatcaagcaaatattataaagttatttgtgaatttggcacttcatagatgaaatattgtgaaattctgaataaaactgcttcattgattatcttggttcctaaaagagatagtttatgagttaaattatctctaacgttgtctaagttggcagtaattaaatctccatgggaattcttaataaaggcaaagaaggactgaaaacaccttgctgaaactgagagagatttaaaaccacaaaaaaaatgtaagatttagttagttgttcacgttttggggtcctgcttttatgtgttaatacttccagataaaattttttcaaaggtagttttgaaccccaggatctgaatatattaatttgtttatctctgaaaactgtatactttgtgtttcccaggtctggctttcttcatttttcctacttgagggaactccttttcttccttcaatatcctcatatcctccttcaatgtttctcagtcaatatctcctctcaatttttccatttaaaaattaaaaattaaattattaacattttaaatacactgaaatgttcatggaatagtagtacaaatacccatttacccaccacatggagttaatagacaataaaaatttgccatatttgttttacatcttttttctagtttttaaagaaataacatgttacaaataaaatcgaaatactctttccgccgattttcttttctcctgtctcagaggcaaatactgctacttgcttctcttgtatctttttagaaatattctctgcatatataagcatatatccatatatttttccacacatagtatctcttccgtgtcttagtttttttcattctacaatgtatcttgatgatcagtgtagctttgtttcattctaataattatatagattccactttacaaatttactatactttggacttgtatctatgaacgtttcgattgttttaaacctttggcaacattacagacaatgctgcaatgaaatccttctgtatgtatacatacgtggatgtgtgtataagatataattctggaagtagaattgctaagttaaagcatatgctacttaattttgaaaaaattgtcgaacttctcttcacaaggcaattatcttcttgaggtaatgagaactcctatttccccatacccatactacccagagtatcttcaaattttctgatttttgctggtctgataagggaacgttacctcagtttaatctttatttgcatttactatgtgtttttgccctgtagagtgaattttacttttctacctaacaatatatttttgtgattttaatgacattacttttgagatttacccatgctaatatataaactctggttctgcaattttaagtgctatatagtatcctattgaatgaccatactactcatttatttattattatctacttgttaattagtctgttatcttttttgtcagtttttgtgggcataaacaatgctaaagcatacatgtctacttgcgcatatgattttttcccagtgtgtttaatagaatgactaaggtagaatgactaaagttctgaggtgtggcaggtatgccatcttcacctttactgggtatgctagtgtgctgcagctgccgtgataaagtactacaagccgggtggcttcaacaatagcattgtactgtctcacagttctggaggctggaagtctaaaatcaaggtgtcagaagggtcggtgccttctgaaggtgtgagagagaatctgcttcgtgccctcttccaagcttctagtaacctcaggtgttccttgtcttgttgatggtgttgtcccagtgtcttcatattgtcttctctctgtttgtgtttgtgtttgtctctatgcccaaatttccccttttcataaggacccagtcgtatgggattagggcttaccctaatgatctcatcttaacttgatcatctgtaaaaccttatttccaaataaggtcattttctgaggtactgggtgttaggatttcaacatcgtttgggggggtaaaattcaatcaataacaacaggtataccagttaagatgtttttggctgcaactaacagaacattcaactgaaaaggtttaaaatatattgtaaattttaaacaaatgttttatagagatgagttctgactgtgttgcccaggctggtctcaaaatcctggcctcaagcaatccttccaccttggcctcccaaagtgctgggattacaggcatgagccacagagcctggccactttaaaatgttgttgacacacataacaagacatccagaagtggggtggtcataggatcggttcagcagcacagtgatggccgaggctctttccttccactcttccatctcccttgagtggctttcagcttcttgtcacaagattgctgcattatgtcctcatatacctggaacagagggcagggagaggggcaagagcacacccccatttcaagtctcttttcatcccaaagtaacatatttcccagcagccctctttcaaccctctctaggcttctccttaaatttcactggccagaattgggccacacggttacccaaaggtataaaagaggcttgagaagtgagaatttgatattttgaatcataataggagacatgctttgccaataggaaagaagggtaaaagaaatcttctggagagtacggaaccaacggcgtctgccacgttgcatatggccaaatggtcaccaaatttgttgtatcactttattttcacaaaattggtgtaaagtcctcattgctattcatcctcgtcatcattcggaattctcaaatttaaaaaatgcccatttccttgttgttttatttttttaattccctgatcattaacataagtaattatctttttatgtgtttatttgtcattcaggtttcttctgtgaaaagcctatttctgtcttttgcttgttcttatgttgaattgtctctacacattcaggattctaatcttctgtcagttatgtggattgcaaataaagtctcccagtctatggcttaactcttgacactatatttatcacgtcccttatttactaaagatttaaatatgatcaaatttatgttttcttttagggttgtgccttttgtatcttatttaagaactgatttctttaatgtgagatcacaaaagggttataaatattctaaaaatgttaaacttttgcttttcatagttagatctttgatccacttggaatttatctttgtgtgtggtgaaattaggaagcccatttcatttttccccagatggatagtcagttgtgtaagtgctgtttatcaaataatccatcctttatcgagggttttctgatgccacttctgttgcatcttgtgtttctttatgtatgtcagtttatttctggactctccaatctgttttatggtctgtttgtcgctataccactgccacgttgtttaaattactaatgctttgatatccaatagaacatgtctgctttctgttacgggagataaatttacatttttaagaagtttatataaatggaatacatatcatttactcttttgtgtctgagttgtatgtctttgtcatgatgtttttgtgattcatccatgttgtatgtattaatagcttgttcctttttattattgggtctattgtgtgtatatatcacaatttgtttatttatctattgatagacatttggcttgtagtcactttttggatacaatgaatagaggttctatgaacattagtgtacaagttattgtatggacatactgacagagcaggagcacagtcctcttggacaaacactgccactttaagttccagctccatttttagcctcatgcatctcagggaaatcacttctcttctaactacaagtagccagaaagagcaaacagtaaaccacagataaaacagctcaggcacagagggaggagggagaaaagtctcttgggtaactgccacacttcaccctcatacagtgggccccagtaaaacagtgggcgttaataaacacattattttcccttcaggtgcactaaaatagggaagctaaaagcagactcggggggtatgcctgcagctgcagaaaaatgtataaaaacagacacacaactctccctccaaaataagcacaacaaaaaacacaaaagcagtccaagcctctaataaactctcctatcctaaatccttaaaaactcttagtctgtaagagagtgtgctgttgacctagctcagccaaaagctcctcacaggttcgttttctctaaaataaacctgtcttaactggcaagccacctttcgtgttttttttcctctttctttaattcttacacatactgttttatttctcttgagtgaacacccagaaatagaatagcagagccatatggtacataagttgattagctttttgagaaaccaccaaactgttttataaggcaattgtatagttttacatgtgtagcatcagtgtgtgaatattctagttgttctacgtccttgttaacatttggtattgtcagacttttaaattttagccatctaaaaatttatagtgttattttatggtggttatagtttgcatttcccccatgactaatgatgctgaggatcatctcataggctttttgaagtatgtgttcaaatcttttgcccatctttaaaaattagggtttttgttttgtacaaatacttggaaattaagcaacatactccagaatgaccaatgggtcaatgaagaaattaagaaaaataaaaaaacttactgaaaatgatgaaaacatgtctaacaaataaaaattgatacacaacataccaaaatctatggaatacagtaaaagcagtactaggaggaaagttcatagtaatgattgcctacgtcaaaaaagtagaaagatttaaaacaacttaacagtgaacctcaggaaactataaaagcaaaacaacaacaacaaaacccccaaactccaaattagtagaaggaagtaaataataaagatcagaacagaaataaatgaaataggttggaaaagtaatacaaaagatcaacaaaatgaaaagttgttttttaaaaaaaattgactaagcattacctagactaactaagaaaaaagagggaagaaccaaataaatgaaaaaggagatgttacaattgataccacaaaaatataaaggatcgtaagagactattatgaacaccaataaattggaaagcccagaggagatggataaatttctgggcacctacaacctaccaagattgaaccaggatgagatacaaaatccgaatagaccaataacaattattgaggaacctcaataataatttttattaaacaacaataaaaagtttcccaattaaaaaaaaaagctcaggactggatggctttactgctggattctaccaaactttgaaaaataactaccaattcttctcaaactattccaaaaaattgaagggaagagaattcttccaaactcattctataaggccagaattaacctgatacaaaaccagacaaggatacaacaacaaaaaaagaattttgcaggccagtatccctgatgaacataaatggaaagttcctcaacaaaatactagcaaactgaatccaacagcacattaataagtttatttactaaaaccaggtgggattcattccagggatgcaagagtggttcaacatacgcaaatcaacaaacataatacatcccatcaacggaatgaaggacaaaaatcatatgatcaccacaatagatgcagaaaaacagttgataaaattcaacatccctccatgataaaaactctcaaacaattaggtttagaagaaggaacacacttcatcttaataaaggccatatatgacaaatccacagctaatattgtaccaaacagggaaatgttggaagttttttctctaaaaactggaacaagataaggatgcttaccctcactactctgattccacatagtactggaagttctagccagagcaattaggcaacagaaagaaataaaagacatccaaatttggaaggaataagtcaaattgaccatgtttgcagatgacatcctcttacctacagaaaaatctaaagactccaccaaaaaactcttagaattgatatacaaattcagtaaagttgtgagatacaaaatcaacatacaaaaatcagtagcatttctatacaccaataataaactatctgtaaaaggaaccccacttacaatagctaccccccaaaaaaaacctccacctaggagtaaatttaaccaaagaggtgaaagatctctagaataaagactacagaacactaataaaagaaattgaagaggacataaaaaattggatagatatcccatgttcatggattggaaaaattaatattgttaagattccatactacccaaaggaatctacagattcagtgcaatctctatcgaattttcaatggcatttttcacagaaatggaaaaaaagattcttaaatttgttaggaaccataaaagaccccaaatagccaaagcaattgtttgttttattttattttattttattttattttattttattttattttatttcacttcatttcattttatttttgagacagtctccctctgtcacacaggttggagtgcagttgcatgatctcagctcactgcaatctctccctcctgggttcaagcaattctcctgcttcagccacctcagtagctagaattacagacatgcactaccatgccctatttttagtagagatagggtttcaccatgttggccaggctggtctcaaactcctgacctcaagtgatccacctgcctcagcctcccaaagtgctggtattacaggcatgagcctctgctcctagccaagccaaagcaattctgagcaaaaagaactggagggatcacactactttactttaaaatataatactatagtaaaacagcattgtattggcattaaagcaacacataaatcaatggaacagaatagagaacccagaaataaattcacatatttatggcctattgattttctgcaacagcactaagaacataaactgaagaaaggacacctttttcaataaatattgctggggaaactggatattcatatgcagaagaatgaaactagagccccatctatcataatataaaaaagtaactcaaaacgaatcaaagacttaagtgtaagaccccaaattatgaaactactaagagaaaacataaggaaaatgttctgagcaaagattttatggataagacctccaaaacacagtcaacaaaggcaaaaatagactaatgggattacatcaaactaaacatttctgtgcagcaaagtaaacaatcaacagagtcatgtgacaaactacagaatgggataaaatatttgcaaacggtttctctgacaaggaattaatatctagaatatacaaggaacttaacagcaaaaagccaaataatctgatttttaaaatcggcaattgatctgaacagacgtttctcaaaagaagacataaaatggccactaagtatttgaaacagtgctctatgtgactaatgattagggaaatgcaaatcaaaatcacagtgagatattatctcacgccagctagaatggctatcatcaaaaagaagaaaaaataacaaagctagcaagaatgcagataaaaggaaacttaaaacatttcagcttttactttagattcaggggttacatgtgcaggtgtattgcatgatgttgaggtttcagaatatgattgaacccatctcccaggtggtgagcatagtacccaatatgtggttttgcaacccttccttcctccttccctccctcctcttatactccccagtgcctagcattcctatttttatgtccatgcgtacccaatgtttagctcccacttataagtgagaaatgtagtatttggttttctgtttctgcgttaacttgtttaggataatggcctccagctgcattcatgttgctgcaaaatacatgatttcattcttctttttgtggctgcatggtattccatggtgtatacataccaccacattttctttatccaatctgccattattgggcatctaggttgattccatgtctttgctactgtgaatagtgctgtaatgaacatataagtgcatgtcttttttttggtagaacaatttattttcctgtgggccatatacccagtagtgggatttctgggttgaatggtaattcagtttttattaatagttctttaagaaatctccaaagtgatattcacagcggttgaactaatttacattcccaccaacagtgtataagcgacaaagaaaattctcacacattgttggtaggaatgtaaattagtacagctattatggaaagcagtgtggaagttccttaacaggctaaaaatagaactaccatatgatccagtaatctcgctactggacctatatccaaagaaaataaaatcatatgtcgaagagatacctgcactcccatctttactgtagtttcatttataataatgaagatatggaatccaccgaagtgtctatcaacagatgaagagataaagaaaatgtgggatatatagacaatggaatgcagccataaaagagaatgaaatcctatcattggtggcaacatggatgagcctggaggacattatgttaagtgatataagccaggcacagaaagacaagtttcatatattctcacttacatgtgggagctaaaaaagttgatctcagagaagtagagagtagaatagtggttactagaagctgagaagggtagggagacagagattgatcaatgaatacaaaattatatatatggatagaggaaataagttttagttttagtgttctatagcattgtagggtgactatagtgaacaataacttattgtatattttcaagtactgagaggagaaaattttgtacattaccagcacaaagaaatgataaacctttgagataatggatatgccaattacacagattcgatcattatgcattgtatgcacgtattgaaatgtcacttcaccccataaatatgtgcaattacatgtcatttaaaagtgataagaaaaattagtttttttgatcttattattgactcgtaggaagcttatatattctgaaaagaagtccattttcagatgtgtactaaaaatattttctttcattttatgacttacctttccattttctttaatggaaacttttaaaaacttttaaaaaacaaagttttaaaaaaatctagttaaggtccagtttgttaacttttttctaatatggcttgtgacgcttattccttctgcctagaatgttcctgggatgtttgtggagctaagtcctcgcttccttcaattctttactcaaatatgtccaccctatttaatgtcaactgtccaccgtatttaatgccaccctatttaatatcactaacacctcctcccccctcactcttgacattcattctagtctattttacatttttttctcatagaactcataaatttctagcatgctttataacttacatattcattatgtttattgtttattgtccgtctttgttccagtaaaatgtaaactcctagaagaacagagacctgtgttttgttcactgatgtaccctaagtgctcacaagtgtttctagcacctagtatttgctcaataaatatttgctaggttgatgaattaatgatttctaagctttccttcagcctgaagagttttctgattgtaagattctacttagataatcctaattgtctcagtgactctcaccagtcactcacttctcccacaaggtggcagtctttaccttcaacacaggttctggtagcctcaaatttgagaattaatagctgagttaacctgcttgttttctttgagcccagacagcctgccctatgggaactgacagctgtaaaatttaaaggacgagtgtaattaccctgcaagatctgagtgcttttaggcaagaggatttagggggtgagagttttcctggagagggacacattatgaaggtgatattgcttaattgatggggactttgaaacatagttgctctttgtgagaatggtataggtttagagagaggtgctagcacagagctgtgacacctgaagtaggctgaccgcagacaaattggatttaaccaccaaatatatctgtgttttcatgtcttcctgccccgtgccctcttatctgactcactttaccccagcactggggaataactgtgccctattctggtcctgacccttttgtaccatctagggaaatgagaactcctcttggggtctcagatcctcatttctgttagaaccaatcctattctgtgggtagggccatggttgtaaatttcctgtgggaggcagcattgctttgcaaaaagaacacagtttggcatgtgaggcagctctgccacttggacaaggtgataacgctttagtctctttatttctaaaacagggaagatgctaataccccgcccatggactagtatgagatttaaatggcaggtacttggcacagtggcaggtggtgaatgctctttggtgatcatgactatccctttctcctggtagtgctgcctcctccctctgagcacctggagtcaatccaccttgggtaggtcagagaaggcagaagaaagtggtgggaggtgaactcgacggaatgatgtacagggcgatagggtgagtgagaggtctgggatctattggcaggagcagaatggtaggaaagggaaaacatgccattgaccttgaatcttgacatttgtgcccatcctatgctgtgttgagcctcaggtcaccgtttgcggaggtgagcagaaaactgctaacagatcgaggcttctccagccttctaggtaaactttcatcagtgggttagttgtcttgttcagaagctgatcacggagctttggccaagcataaacactgattatggcagtccaattgtcataatccctttgattctttaatatcaccttcaagattgtttgttattgtcaatgcccccacaacctaagaccaccaggaacacactgtaattgaaaaaggtgggtttgttgctctctgcaagaagggaggacactcagcatagagactcatgagggtggggcaggttttatccgatgacgttagaaaggacttactgaggatttgggcttgttttaggagatttgggggaaaggttcaaggagactggcttttcctggatgctgccaggaagtagtgggatggtagtaagtctgtggtaggatgtttaaataaatttcctctactgggctggaagaatgagaaggctgaagctgtaataagtaaagaagtggcagtcactcctatcagctatgataaaaggatgtttggctattactttatggtttggatgctatttttgcttgtgttcacatcatggtctatcatggtgataggccacgtacacagtggccttgtctgatgctggtgtcccatggagttgattatgctcagctgaaggacactaaggcccaactgtgggggccaggccagctcctgagtgtcagcgggggctgcactgctttgtcattatcaacatctccacatacaatacagcctgtgcatgtgaggtcccagaaggaaggagctaaagcagctagactgggatcactttactcaatttgaggagaggagtgctcttgagggaaccagaggaaggcagatgagctggtctgatctccttttctattggagctctatgcagatagactgaaaatatttgctaaaacaaagagctccatctctagaatacccttagcaggatgtccttgattaaaggattatttctgaaaactaaatccagaatccgtgaggcatgattccctggaagatcatgtaagctgtacaattctctatggaataaattggagacttcatcccttagatccctttgactgtgtgaggaaccccacgaaacctcacttagtgactttattcattcttctgggcctgaaagcatatgtctcatgcaggaaggaaggcaggaccagtggggctttgcaggttgtgccattctctccttgctttgcttgagactctttattacctgtctccctgacattatttgtagtgtgattctgggtgtgttctgtgattcttgtgactaggtatccaattttgcttaaggatgcaaggaagtgtttggggagaaagctctattggaagaggtctgtagtcctagcctccctccccaccccacatttcacatcattagacctcagcacatgggtctggggcaccaacactgtcttacctgttacacagtgtggtctttatctggatgagggatgcgaaaggatacattgtggccaagagacctgggagaggcacaaaaataacaggtgaccaccaagggtgcttggacctgagatgtttccatttcctaagaccctccaagattctccaacatttggtatagttgcccaggcaatttaacaagaaaatcaaatttttgttatgacccccattgtaatttatgcttatcgcagaaaaattgagactataagaaggagaatagaaggtcacaaaaccactctatactagtccagggatagctattcttacaacatggattgatcagtgtggggtgatttctcctagtgttttttggacagagaagcattgaagatgccctggttttaaggtcttaggatgaaggaattatagttgaacagttcaaaatgatgttatgaattactttcagatttgtttgcttgattgcattagccttgcctggccctacggtaactatttggttccatcatggtggctgagtaggtggctctggaaaaagagctattcaagaaaagcttttctttctctaaaaatattgtagggggctcgccctctgttcttggaagcaacgtttgggatggcctcttgggaggctgtctggtgaagtgtctaggggtatgtggtctggacttggacaggacaagatgcaaattctggctgggatattctagttgtggagtgttgggcaagttacttggtcttctgagtttataggtaaactggagataataggtatgtgtgaatgaggatccaatgagatgcctgtaaaacacttagccagatggctgcgtgaagaaagcacttggtaaatgctaattgttgtggttgttataattagtacaatgattagtcattgctgattgttggctaactggcggtaagaaatgaaagtaaagtaaggcagtagcagctgagggaggtggtggagggaatcaggagacacttggaggttctggttctgcctgagtttaagtgctggggaaaactagttgaataactgctggtctaacatttaacagctgtgtgacctcgggctagtcacatttcctttataaacttcctttttctcatttgcgaaatgaaggggtttcgttaggttacttctcatcacccctggttgaccattagaatcgtttgggagacctttttagaaattcttggttctggggtcttccattttccccattctcacttggtgggtctgaaagcaggcactgcagcttttccaaagctcttcaggtgaccttgaagtgtggccagggctgagaacctctgacttccaacagcacttctggtttaggaaggagcaaatcacaggcacagaatgagctctcaggaacggctgctgagctagtaattgccgtgacactgtctccctgtcccaactgcaggcacccctagacgtctcctgatgaagacttccaattttggaacagaagaatctttgaaaaaaatattattgaacttccagaaatgattcattccttctctgctccttctttagttggaaagatctgcccccatccctgtctactgcagtcccaatccctttttatttcaacatatatatccaaaccaacaaaaaaattgactcgcacaaccaaggtgaggtgtttggctttaaggataaaataaatagtttcataaaacctgcccccagatttctcattgcctctactcattttctctaatttgtagggcacactgaaagctcggattcataagatgtagaaagggcagagagttaagttacaaactcttcctaggtctgtttcaactctaacgttctatagctctgctccgtctaaacaaggaattctgttaaatttgtaacctggactttcttgaatactgaggtaatgtttcttgaagtaggatatatatacccaagaagaataaaaataattctggaggtgtcttaattctctgtgggactcaataaaagttttggtgattatatataaacacacttatgaaagcatctggtacatgtaggtgctcagtgcacatgaatttctctttcctgccagatcttttgtagtggaaaattatcttattcttccatctttgtctgcaaagatgctgctaaggaaagatgtagaagagttttacaagggagttggagtatgggaacaggaagttcccaagaaggccactgcattaatagaattgaaacaagatcccctaaaggaaaatcgctgccaaatctcttttctctaaactatccaaaatggtgccccataaattttcattgacattgaagtacataatgtaataagcttttttttccttaaatatataatgtacggagaaaaccaggttgataatggtttcctggcatagctttcaaaggcaagtgtggatgaagtggaaatatggtgcacagatattggaaagaaaccgctgttgaactcttcacattttcatgtataacccaatgattctcaaacctaaacttgcatcagaattgcctggagggcttattaaaacatgattgttggatgccacccttgcattaattaattacacctgcaactgttctatttttaaatggtcacattttaaggtactgggctgaggacttcattatgtgagtttcaaatgggacataattcaacccctagcccaatcctagtgagtggtgagtggtatctcttcgttttgatttctacttccctagtgactaatgatgttgagcatttttatgtgtgtttattagccatttttatatctcttatgaaaaaatgtgtataaaattattggcccatttgttaattgggttatccatttattattgaattataagagctctttactactctggatgcaagtcctgaaacagaaataatatttacaaatattttaatccattctgtgaattttattttcactttcttgatggcgtcctttgaagaacgtaggattttaattttgataaagtgtaatttatgtattttttcttttgttgctgtgcttttggtatcatatttaagaaataattgcctaatccaaggttatgacaattttttattctatgtttgcctctaagaattttctaattttaccttttatatttaggtctttcattcattttgagtcaatttttgtatatggtgtaaagtatgggtcctaatttattcttttgcatgtggatatcttgttgtccctgcaccatttgttgaaaagtgttgttttttttttcccattgaatggccttggcactcttgtctaaaattaattgatggtaactgtaagactttatttctggactctttattccattgatctatatttctatcattgttactgagcaatgtgcttgctgcctgacagatagggaagccaatattatggaactggtttttgagaaaagcaaaagctttatcgtgaggttgacttgcaaggaaacaggatgcaaagctcaaatctgtctccccttctgggatctgggacaagttttatgggttagggagggcaagctggtatgcagaagcactggtagggcaggtttcaactggaagtactttaaacaagaccatttatggtaaggtatggtaagggtcttaacactggacatgcctgggctcaggtttcttgcttttaaaaatgtttgggccctcaggttccagtcatgtcttgaccattttcttctgtggtggggcaggagaggaatttttcttctgggtgttattcaaggttgaggtcttcttttctgcattgcttcggctgcatgacttaacaactttttgactttgtgcctgtaaaataacttgacatactattatcatcagagtagggccagttagaactggtcctgtgattacatcattatgccagtaccaattatcttgattactgtagcattgtagtaagttttgaaatcaggaagtttgtgtctttcaactttggtcttctttttcaggatttttggctcttctgtgttccttacatttccatatgaattttaagttaaactgtcactatctgcaaaagaaggaactgggatttttatagagattacattgaagctgtaaatcagcttggagaatactgtcatcttaacaatattaagtcttctggccgggcacggtggctcacgcctgtaatcccagcactttgggaggccgaggcgggtggatcacgagctcagaagttcgagaccagcctggccaacctggtaaaaccccgtctctactaaaaataataataataaaaaactgggcatggtggcatgtgcctgtaatcccagctactcaggaggctgaggcaggagaatcatttgaaccctggaggcagaggttgcagtgagccgagatcgcaccattgcactctagcctgggcaacagggcgagattctgtctcaaaaaaacaaaaacaaaaacaatattaagtctcctgatccatgaatgtagaatgtttttccatttgttcaggtcttctttactttgtaacagtgttgtgtatttttcaatgttccagtcctgtaattctttgttatatttactcctaagaatattaattgttttgctgctattataagtggaattgtttaaattttgattttatatttttcattgatagtatatttttcattgatagtatacaattgatttttgtacactgattttgtaacctgaaaccttgctgaccatgtttactcgttctaacagtttcctttttgtggatttcttataattttctatatacagtatttcatgtcatccatgaaggggataggtttacttcttcttatctaatctggatgagtttagtttatttttcttacctaaattccttggctagaactccaatacaatgttgaatataagtaatgaaatcagacatctttggactgtacttgattttaagggggagcatccagtcttttgccattatgtataatgttagctgtggggtttaatagatgaattttatcaggttgaggaaattttatttctaatctgctcagtgtttttttcatcacaagagtgttggattttgttaatatttttgtgtgtctattgagatgatcatatggtttttgtcattctacaaaatacagcacattaaattgatggatttttacatgttaatttttttttaaattttactttaagttctgggacacatgtgcagaacgtgcaggtttgttacataggtatacatgtgccatggtggtttgctgcacctatcaacctatcatctaggttttaagccctacatgcattaggtatttgtcctaatactctccctccccttgctccccacccccgccgacaggccccggtgtgtgttgttcccctccctgtgtccatgtgttctcactgttcaactctcacttatgagtgagaagacgtggtgtctggttttctgttcctgtgttttttagctgagaatgatggcttccagcttcatccatgtccctgcaaaggacataaactcattcttttttatgactgcatagtattccatggtgtatatgtgccacattttctttattcagtccatcatttatgggcatttgggttggctctaagtctttgctattgtaaatagtgctccaataaacatatgtgtggatgtgtctttatagtacaatgatttatactcctttgggtatatacccagtaatgggattgctgggtcaaatgatatttctggatctagatccttgaggaatcgccacactatcttccacagtggttgaactaattcacactcccaccaacagtgtaaaagcattcctatttctccacagcctcaccagcatctgttgtttcctgactttttaatgatcgtcattctaactggcgtgagatggtatccattgcgattttgatttgcatttctctaatgaccagtgatgataagctttttttcatatgtttgctgggcacataaatgtcttcttttgagaagcatctgttaatacccttcgcccactttttgatggggttgtttttttcttgtaaatttgtttaagttgtagacttaggatattagatctttgtcaggtggatagattgcaaaaaatttctcccattctgtaggttgcctgttcactctgatggtagtttcttttggtgtgcagtatctctttagtttaattagatcccatttgtcaattttggcttttgttgccattgcttttggtgttttagtcatgaagtctttgcccatgcctatgtcctgaatggtattgcctagattttcgtctagggtttttatggttttaggttttacatttaagtgtttaatccatcttgagttaatttttgtataaggtgtaaagaaggggtccagtttttgttttctgtatatggctagccagttttcccagcactattaattaaataggtaatcctttctccattgcttgcttttgtcaggtttgttgaagatcaggtggttgtagacatgtggtattatttctgaggtctctgttctgtttttgttttttgttttttgttttttgttttttttttttgagatgagatctcgctctgttacccaggctggagtgcagtggcacgatctcggctcactgcaacctccgcctccctggttcaagcaattctcctacctcagcctcctgagtagctgggattacaggcatgtatcaccgcgcctggctaatttttgtatttttagtagagatggggtttcaccatgttggtcaggcttgtctcgaacttatcacctcatgatctgcctgcctcagcctcccaaagtgctgggattacaggcgtgagccaccgtgcccggccaaggtctccgttctctttcattggtctatatatctgttttggtactagtactgtagttactgtagccttgtagtacactttgtagtcaggtaacgtgatgcctccaacttcgttctttttgcttaggattgtcttggctatacgggctcttttttggttccatatgaaatttaaagtagtttttttctaattctatgaagaaagtcaatggtatcttgatgggaatagcattgaatctatcaattactttgggcaatatggccattttcacaatatttattcttcctatctatgagcatggaattttttctatttgtttgtgtcctttatttccttgagcagtggtttgtagttctccttgaagaggtccttatgtctcttgtaagttgtattcctaggtattttattctctttgtagcaattttgaatgggagttcactcgtgatttggctctctgcttgtctattattggtatataggaatgcttgtgatttttgcacactgattttatatcctgagactttgctgaagttgcttatcagcttaaggaggttttgggctgagacgttggggttttctaaatatacaatcatgtcatctgcacacagagacaatttgactttctctcttcctatatgagtacactttatttatttcttatgtctgattgccctggccagaacttccaatactatgttgaacaggagtggtgagagaggacatccttgtctcgtgccacttttcgataggaatgcttccagcttttgcccatttagtatgatatgggctatgggtttttcagaaatagctcttattattttgagatatgttccatcgatacctagtttattgagagtttttagcatgaagggatgttgaattttattgaaggacttttctgcatctattgagataatcatgtgatttttttcattggttctgattatgtgatggattatgtttattgatttgtgtatgttgaaccagccttgcatcccagagatgaagccaacttgatcgtggtggataagctttttgatgtgctgctggattcagtttgccagtattttagtgaggatttttgcatcgatgttcatcagggatattggactgaaattttctttttttattgtgtctctgccaggtttcggtattaggatgatattggcctcataaaatgacttatggaggagtccctctttttctattgtttgcaatagtgtcagaaggaatggtaccagctcctctttgtacccctggtagactgcatgttagacgagataatatgtatgaactacctggcatataatagatgcttcctaaataagattctaaaaaataattatgctccaaaaatatttttaaaatcaaataatttatgttttattttctgtgttttatctcagacatgtagactgccaaagtgtatgggatgctttcaagggtgcatttatttcaaaacatccttgcaacattactgaagaagactatcagccactaatgaagttgggaactcagaccgtaccttgcaacaaggtaattgggggcatgccattgattttaaaactggggataaaagccaatggtaacaattcataggtccaaatttttattagaatgaaggaagaggaaaaatccagacattatagtgtgagtgtggttggtaggaatggaatttgcaggccattgaggggccatgatataattaagatttaggacatctggagaagggagctaagagagagaaatagggatacagagataggaaaggggctttggccaaaaactaggcagaaaaaacctaacaccaaacccaactcgaacaaacaaattaacacgacctatataataacaaaactttcccctgacctatgataataatagtagtagtagtagtaataacagcaatgccaagttacacttgcagactgcttcttctttttcttgcttacaaaagactctcctaatccttactttcttaggccttcatagccattctctggaatgggcacatcaggtgtcagcatcccaatttcaccagtgagaaaactgagggttggtgtgtttaggtgaccagtgttgcccaagtttgacaggcttcaaagtgaccagtttaaatgtaaatggtatgagacctggagccacagaggcctggattctaatacattggttatattggaaaagctctatcagagtgcaccttttctatagccaatgtttaaggcaaaattccatgtgcctaaaattttctttgtgaagcccttaaatccatccagaaattacagcctctcattccattgttagtgagctggagtcattgtgaaacttctccattcactaggcgtgatgccctatgcagagaaggtgtttggcaaataataacccaggctgacatttgtcaaataagtgactatgcgatggatagtatgctaagcaatttacttgcatttatctcagttaatttccctagcaccccattagtttatttcagtcattatcattaccattttacaggtgtagaaagtggggcttagtgatgttttggttgctcaaggtgaaacacctgataagtgatgatgatgctgggcttcaataagggctgggattttagggcccatactttaaaccagtatccttcactgactcccattaagaatgaatagggggaggagccaagatggctgaataggaacagctccagtctgcagctcccagtgagaccaacgcagaaggtgggtgatttctgcatttccatctgagatcaggtttcctcgtgtgtctacaccaccagggccctgggtttcaggcacaaaaccgagccgctgtttgggcagacaccaagctaggtgcaggagtttttttcgtaccccagtggcgcctgaaaccccagtgagacagaactgttcactcccctggaaagggggctgaagccagggagccaagtggtctcgctcagcgggtctcactcccacggagaccagcaagctaagaaccactggcttgaaattcttgctgccagcacagcagtctgaagttgacctgggatgatggagctgggtggggggaggggcgtccgccattactgaggctttaataggcggttttcccctgacagtgctaagggggctgggaagtctggactgagtgtggcaacgtggttgtggccagactgcttctctagattcctcctcactgggcagggcatctctgaaggaaaggtaacaaccccagtcaggggcttacagacaaaacctccgtctccctgggacagagcacctggcagaaggggcagctgtgggcacagcttcagtggatttaatcattcctgcctgctggctctgaagacagcagctgatcctgacaagagggattctcccagcacagcacaccaactctgctaaaggacggattgcctcctcaagtgagtccctgacccctgtgtctcctgactgagagagaccacccaacaggggtcgatagacacctcatacaggagagctccggctggcatcaggccggtgcccctctggaatgaagcttccagaggaaggagcaggctgtcatctttgctgttctgtagcctccactcgtgataccttcaggtgcgggaggaacccaggtgaatagggtctggagtggaccccctgcacactgcagcagccctatggaagaaagggcctgactgctaaaagaaaaaacagaaagcaacaacatcaatgaaaaagaccccacaaaaacccatccaaaggtcagtagcctcaaagatcaaaggtagataaatgcaagaagatgagaaagaatcagcacaaaaatgctgaaaactcaaaaagccagtgtgcctcttctcctccagatgatcttaacacatctccaacaagggcatagaactgggctgaggcccctaaaaagagatgagttcatgtcctttgcaggcatatggatgaagctggaaaccatcattctcagcaaactatcacaagatcagaaaaccaaacaccacatgttctcactcataagtgggagttgaacagtgagaacacatggacacagggaggggaacatcacacaccagggcctgtcaggggtgggtgctaggggaggataacattaggagaaatacctaacgtaggtgacgggttgatgggtgcagcaaaccaccatggcatgtgtatacctatgtaacaaaactgcacattctgcacatgtaacccagaacttaaagtataaaaaaacaaaagatactagctacatttacccaatgttaaaaaaaaaaaaagaactgggctgaggctgaggtggatgaattgacagaagtaggcttcagaagatgcataataatgaaattcactgagctgaaggagtatattctaacccactgcaaagaagctaagaaccatgataaaacataggagctgttaaccagaataactggtttagagaggaacataaatgacctgatggagctgaaaaacacaacacgagaacttcaagatgtaaacacaagtatcaataaccaaatagaccaaacagaagaaaggatatcagagcttgaagagtatcttgctgaaataagacaggcagacaagattagagaaaaaagaatgaaaaggaacaaacaaaacctctgagaactatgggattacataaaaagaacctatgactgattggggtacctgaaagagacaggaagaatgaaaccacgttggaaaacacacttcaggatatcatccaggagaacttcttcaacctagcaagatgggccaacattcaaattcaggaaatccagagaaccccagtaagatactccatgagaagatcaaccccaagacacataatcatcagattctccaggtcacctataaagggaagccaattagactaacagcagacctctcagcagaaacctacaagccagaagagattgggggccaatattcaacattcttaaagaaaataatttccaaccttgaatttcatatctagccaaactaagttcataaatgaaggagaaataaaatctttttcagacaagcaaatgctaagggaattcgtcaccaccaggcctgccttgcaagagctcctgaaggaagcactaaatatggaaaggaaaaaccattatcagccactacagaaacacaccgaagtacacagaccaatgacactatgaagcaactacgtaaacaaatcttcacaataaccagctagcatcatgataactggatcaaattcacacataacaaattaaccttaagtgtaaatgggctaaatgtcccaactaaaagacatggaatggcaagctggatagtcaagatcaattggtgtgctgtatacaagagacccatctcacatgcaaagacacacataggctcaaaataagggatggaggaatatttaccaagcaaatgggaaacagaaaagagcaggggttgcaatcctagtttatgacaaaacagactttaaaccaacaaagatcaaaaaagaaaaagaagggtattacataaggataaaggggtaaattcaacaagaagagcaaactatcttaaatatatatgtgcccaatacaggaacaccgagattcataaaacaagttcttagagaccttcaaagagatttagatacccacacaataatagtgggagaatttaacatcccactgtcaatattagacagatcatcaagacagaaaattagcaaagatattcacgacctgaactcagctcaggatcaagtggacctgatggatatctactgaagtctccatgccaaagcaacagaatatacattattattggtgccacatggcatctactctaaaattgatcacacaattggaagtaaattactcctcagcaaatgcagaagaactaaaatcataacaaacaatctcacagaccacagcataatcaaattagaactcaagattaagaaactcactgaaaaccatgcaattacatggaaattgaacaacctgctcctgaatgactcctgggtaaataataaaattaagccagaaattaagaagttctttgaaactaataggaaaaaagagacaatgtatcagaatctctgggatgcaactaaagcagtgttaagagggaaatttatagcactaaatgcccacatcaaaaagctaggaagatatcaaattgacatcctaacatcacaactaaaagaactagagaaccaagagaaaacaaatcccaaagctagcagaagacaagaaataaccaagctcagagcagaactgaaggagatagagacacaaaaatcccttccaaaaaaaaatgaatgcaggaggtggttttttgaaaaaaaattaatagaatagatggatcgctagctagactaataaagaaaatagagaagaatcagatagatacaataaaatgataaaggggatatcaccacagaaatacaaacaaccatcagagaatactataaatacctctatgcaaataaactagaacatctagaagaaatgaataaatttctggatacatacaccctcccaagactgaaccaggaagaagttgagttcctgaacagaccaataacaagttctataattgaggcagtaataaataccaaccaaaaaaaaaaaaaaaaaagcccaggatcagacagatttataactgaattttaccagatttacaaagaggagctgataccctttcttctgaaactgttccaaaaaattgaaaagtaaggactcctccctaactcattttatgagactagcaccatcctgataataaaaactggcagagatttaaaaaaaaaaagaaagaaagaaaacttcaggccaatatcctgaagaacatcgatacaaaaattctcaacaaaatactggcaaactgaatccagcagcacatcaaaaagcttatccaccatgatcaagttggcttcatcctcaggatgcaaggcaggttcaacgtacatgaatcaataaatgtaattcattacataaagagaactaaagacaaaaaccacatgattatctcaatagatgcggaaaaggccttcgataaaattcaccatcccttcacgttaaaaactctcaataagctaggtatcaaaggaacatacctcaaaataataagaaccatttatgacaaacccacaagcaatatcatactgagtgggcaaaagctggaagcattccccttgaaaaccggcacaagacaaggatgtcctctctcaccactcctattcaacatagtattggatgttctgaccgggacaatcaggcaagagaaagaaataaagtcttttcaaatggaaaaaaggaaataaaattgtctttgtttgcagatgacatgatcctataactagaaaaccggatcatctcagccccaaagcttcttaagctgataagcaacttcagcaaagtctcaggatacaaaatcaatgtgcaaaaatcacaagcattcctgtacaccaacaacacgcaagcagagagccaaatcatgaatgaactcccattcacaaagggaataaaatacctaggaatacagcaaacaagggaagtgaaggacctcttcatggatacctataatccactgctcaaggaaatcagaaaggacacaaacaaatagaaaaacattccttcctcatggataggaagaatcaatatcgtgaaaatggccatactgcccaaggtaatttatagattcagtgctattcccattaaactactattgacattcttcatagaattagaagaaactattttaaaattcatatggaaccaaaaaagctcatatagccaagatgatcctaagcaaaaagaacaaagctggaggcatcgtgctacccaactccaaactgcactacaaggctacagatgccaaaatagcatggtacttgtacaaaaataaacacatagaccaatagaacagagtagagatctcagaaataaaactacacatctgcagccatctaatctttggcaaacctgacaaaaacaagcaatggggaaaggaatccacatttaataactggtgcttgagaactacctagccatatgcagacaattgaaactggaccccttccttgcaactcatacaaaaattaagatgaattagagacttaaatgtataacccaaaactataaaaaccttagaagaaaatctaggcaatatcatttgggacacaggcacaggcaaagatttcatgaaattgccaaatgcaattgtaacaaaagcaaaaattgacaaatgggatctaattaaactaaagtgcttctgcacagcagaagaaactatcatcagagtgaacagaaaacctgcagaatgggagaagatttttgcaatctatccctctgacaaaggtctaatatccagaatttacaaagaacttaaacaaatttacaagaaaaaaataaacagccccatcaaaaagtgggcaaagaacatgaacagacacttctcaaaagaagacatccatgtggccaacaaacatatgaaaaaaagctcaacatcactggtcattagagaaatgcaaatcaaaaccacaatctcatgccagtcagaatggcattattaaaaagtcaagaaacagcagatgctggtgagattgtggagagatagaaatgcttttacactgttggtgggaatgtaaattagttcaaccattgtggaagatagtgtggcaattcctcaaagatctagaactagaaataccgtttgacccagcaatcccattactgggtataatagaaatcattctattataaagatatgtgcatgcatatgttcattgcagtgccattcacaatagcaaagacatggaatcaactcaaatgcccatcagtgataggctggataaagaaaatgtggtacgtatacaccatgaaatattatgcagccataaaaaggaacaagatcatgtcctttgtagggacatagatggagccagaagccacatcttcagcaaactaacacaggaacatgcaaatgctgcatgttctcacttataagtgggagctgaacagtgagaacacatggacaccaggaggggaaaaacacacactgtagcttgttggggttggggtgaggggagtgagaacattaggacaaatagctaatgcatacttggcttaatacctaggtgatgggttaataggtgcagcaaacccatggcacatatttacctatgtaacaaacctgcacatcctgcatgtataccctggatatacatgcccaggatatacattttatttaaaataaaaataaaaataatagattcataaaacagaatataattctgaactttgactccctgtacctttaagagggacccttaaatttaaaaatctattgtattttttttttagtaggggtagggaatatttagggaatttggaaggggttatatagttctttaagaatcaaatagcacatcttcctgaaaatagcacgtagacaaagtttttttggagataaccttaggaatatcgtaactctctgatgccacctccatatgtgatcctatgttgattataagattttgatcagtggctttcagacttttttgactgcaacctagaataaaagattcatttacattgtgacctagaacacacacacacacacacactctctctccgccactctcctgcacacagaaatcattgatgcttacaacaattcttactcttactatgggtgatttactttgatatgctctgttttttttttcatttacaaaactgtggattaattttttttgacatgctaaattgatctcagtaatagattgtatttattcttccttagattcttctttggagcagaataaaagatctggcccatcagttcacacaggtccagcgggacatgttcaccctggaggacacgctgctaggctaccttgctgatgacctcacatggtgtggtgaattcaacacttccagtgaggctctgggccctgtgggattgcccagggatgtggagggtgaacagagtgacttctgctggaggccctgaatgattagtgtggaggacagagccacaggcacccatcctgatgccatctatacttatattagtccatttgtgttgctattaaggaatacctgaggctgcgtaatttataaagaaaagaggtttatttgactcacagttacgcaggctgtacaagaagtagggtaccagcatccacttcgggtgaaggcctgaggctgtttccactcatggagaaggggaaggggagctggcatttacagagatcacatggtgagggaggaaagcaaggagaggtcaggggaggtgccaggctgtttgtaatgaccagctgtcctgggaactagtagagtaagaactcattactataaggacagcaccatgccattcgtgcaggatcatccctatgacccaaacacctcctactagtcccgagctccaacactgggggtcgaatttcaacataaggtttggagagttaaatatccaaactatagcactacccttaatggcaactcaggctgatataaagtagcattccctgttttcttgaaaaattgacttcagagttggggattgcccatgctccctaattcccttcttttgagtgctcacatagcctgcttccgaattcttggtattttgctctctgtaaggtcatcattcaggtccaaagaagtctagaacaggatgaggtctcagtgggacctagaccaaggttcttgctcttcagaatcatcacagtagccatggactggactcttccatctcaggcactggctttgccatcatttttcagatgtagccttatcctgcccagaaagactcaacacctcaccaggggaagggatttcctacaaccaaaaccctactgcagttttcacttcttttttttttctttttgtttatatggtggatatttttactttatatagttttattcttatttttactgtttttcattgtttgtttttaaaagcttatcttattatagcttctttgtcccaggtttgcattactttcaattacaaaaataaagcatgattatttgaaaaaaaaatacttgcacattacagaaatgcataaaagcaaaaagcaaatgtcactctgaattttcccttcacctcctacctccgcatcacttctcaaagggtaactattatcagcaatttgatatagatctttctagacttttcctatgctaatgtaaacatatatatttaaaatgtacacgcgctgttgtgcaacttgctttattcacttaaaattggtaggtataaagatagctatcctcttttaaaaggctttatcattaagaatcctattaatggatattaagttgctttagttttggttgctattatgtcattattgtaagaaacacttttgtgcgcacacacacacacacacacacacacacacacacacacacctgcatacttgaacgataaatttttataaatgaaacttcaatgttaaaggataaattgtaatagaaactggtaacatgtcatttaaaagatggtaactataccctcatcaagagtatatatatgaggccaggcacagtggctcatacctgcaatcccagcactttgggaggtggaggagggaggatcacttgagcccagtagtttaagaacggcctgggcaacatagtaagaccccatctctattttacactaaaaaaagaaaaaaaaagaatgtatatgagatagtttatttacctatatccccactaacaccaggtattgttactttaaaatttttggctcatttcagaagaaaataatacctcaatttagtgtgaagttctttgatggtgaggctactatatatacataaatggtagattttctgtttcttctgtaagctggcagttcatatattttgaccatctgtatgcggtatctattattttctaattagtagaagttctttataaattaataagagctacgatgtattaagtacttacaaagtgccagtgttccatgtgctacgtaagtagtcactcatttaatcctccacagccccatgaggtcatatggtgatcccattttagagataggaagtctgaggcatggagttaagtaatttgccagccagtaagtggcaaagcaagaagcaaagtttctcagactaacttgagaaactttgctcttaactgccatgtttttctgcccactttctggctcaagttggcgaatatatttttcttattttggactttacacggtgtttatggtctgtcttttgccacccagaaatgcagaaaacctgtctgttctcttccttatagcttctgtgtttcatatcttccttaaaaagatcttcttagagaagcattcttctgtattttcacctactatttttactttcacaatgtttaaaatattttccatatttagatctgagtcttcccacctagaatatggtaatataaatatgtttttccattaatttttttagattttacagtttttcccatgttccatgttttcctttttaaatttcccttttaacaatgactgttttattggtcattcatttaacatttagcttttaaatgtatttacagtagacttctctccttttgttttattttttaatttgttcaatttttcttgaaataaagtagagaaaatgaaataatttatttttaagaactgatttatttacagttcagagttccttatttttgccttcttttaaattgaattatgtatatgtagttttatttatctacattctaatactttggcctcaatttttaatttcttcttattttatagattatctttcaagttcctgatgtatatgtatttatttactttttattctaagttgacaatttataattgtatgtatttgtggggtgaaaaatgaatttatgaatacaatgtgggataattaaatcaagctaattaacatatccaccgcctcaaatactttttttagtttttgagacagggtctcactctgtcacccaggctgaggtgcagtggtgcaatcacaattcactgcaaccttgacctaccaggctcaggtggtcctcctaccttagcctcccaggtagctgggactacaggtgcctgccaccacacttggctaattttttgtattttttttagagacagggtttcaccatgttgcccaggctggtcttgaactcctgggctcaagcgatctaccctcttcagcctcccaaagtgttgggattacaggtgtgagccaccaggcccgacctcaaatacttattttttgtagtgagaaaatgtgaagtttactgtcttagcaatgttgaaatgtacagcacactattattaactacaatcaccatgctgtgcaataaatatttttaaaaaccctttctaactgagattttgtactctttgaccatcatctccccattccttccaacttctggtctctgtatccaccattctattatctgcttctatgaacttgattgttttagattccatatgtattaggacatgcagcatttgtctttctgtgggtggcttattttacttagcatattgttttcttgttccatctatattgtcacaaatgacagaatttctttctttttaaagtctgaatagtattccattgtgtatatataccacactttatccattcgtctattgatggactcaggttgattccatatcttggctattgtaaatagtgctgcaatgaacatgggggagcaggtatctctttgacaaactgatttgaaatcttttgggtaaatacctagaagtgggattgctggatcatatggtagtattctatttttagtttgttgaggaactttcatcacattttccataatgggtatactaatttactttcccaatagtgtacaaataaccccctttcttcacattcttgccaacacttgttatttatctttcatctttttgattatacccttctgacaggtgtgagatgatgtctcattgtggttttaatttttgtttccctattaattaggaagcttgagcattttaaaatatatttgttggccatttgtatgtcttttgaaaaatgtctattcaggtcctttgcccacctttaaattgattttttttcttgtttttgagttgtttgagttccttatgtattttgtttttgtttgttttttaatttttaatttttgtgcatacataataggtgtatatatgggatgtgtgtacatgagatgttttgatatagatatacagtgcataataattacatcatgaaaaatgtctctttccccataagcatttatcttttgtgttacaaacaatccaattttattcttttagttattttaaaacaggggtgtccaattttttggcttccctgggccacattggaagaattgtcttgggccacacataaaatacactaatactaatgatagctgatgggctgaaaaaaaatcgcaaaaaatctcctaatttctaagaaagtttatgaattgaacttatgtgttgggctgcattcaaagctgtcatgggctgcttgagacccatgggccatgggttggacaagctttttttaaaatgtacaacaaaattgttattgactacagtcaccatactgtgctatcaaataataggtcttattcattctaactattttttggtaaccatccccacctccccacaatgtcttgctacacttcccagcgtctggtaaccatttttctattctccatgtccatgagatcagttgttttgatttgttggatgctaaaataagtgagaacatcctatgtttatctttctgtgtctagcttatttcacttaacataatgacctccagttctattcatgttgttgcaaatgacaggaacacattcttttttgtggctgaatagtactccattgtgtataaataccacattttctttatccatttatctattgatggacatttaggttgtttccatatcttggctattgtgaacagtgctgcaataaacatgggagtgcagatatctcttccattgactgattttctttctgttgggtatatatccagcagtggcattgctggatcatataatagctctatttttatttttttgagaaacctcaaaactgttctccatagtggttgtactaattcacattcccaccaacagtgtacaagggttcccctttctccacatcctcatcattatttgttattgcctgacttttggatgaaagccattttagctggggtgagatgatatctcatgatagttttgatttgcatttatctgatggtcaatgatttgaacacattttcatatgcctgtttgccatttgtatgtcttcttttgagaaatatgtattcaaatcttttgcccatttttaattggattattagatttctttcctatagagttgtttgaattacttatctattctggtttttaatgccttcttgaatgggtagtttgcaaatattttctcccattctgtgggctctctcttcactttgttgattgtttcctttgctatgcagaagctttttaacttgatgtgatcctgtttgttcattttgctttcgttgcctgtgctcatggggtattgctcaataattttttttgcccagacaaatgtcatggagagtttccccagtggtttcttgtagtagtttgcagtagtttcatagtttgaggtcttagatttaaatctttaatctattttgattttatttttgtatgtgatttgagataggggtctagtttcatttttatccattgagccactctgtgccttctgattgtagagtttagtccatttacatttgacgtaaatgttatatttttaagtaaggacttactcctgccattttgttacttgttttctgtttgttttgtggtcttctcttccttctttctttcctttctgtcttcctttcagtggaggtgattttttcagtttcctgctttttattttttgtggaactgttatatgtttttgagtttgaagttaccatgaggcttaaaaatagtatcttatatcccattattttaagctgataacaacttaacacagtttgcataaagaaacaaagacagcaaacagaaagctaatacaaactctataccttaacttcattctcccactctaaaactttttgttgtttctatttatgtcttattgtactttatatgtcttgaaaagttattgtagttattatttctgattggctcatcatttagtttttctacttaagacaagagtagtttacacgtcatagttacagtgttataacattctgtggttttctgtgtacttactactgccagtgagttttgtaccttcagatgattaaattgctcattaatatccttttctttctaattgaagtactccctttagcatttcttctaggacaggtctcgtgttaattaaatccctcaccttttgtttgtctggaaaagtctgtgtttctccttcaagtttgaaggatattttcaccagatatactattctagagtaaaaacttttttttttgtctttcagcacttcaaatatgtcatgccactctcatctggcctgtaaggtttccactgaaaagtctgctgccagatgtactgaaactcccttgtatgctatttgtttcttttctcttgctgcttttaggatcctttctttatcttggacctttgggagtttgattatcaaatgctttggggcagcattcttgggttaaatctgcttggtgttctataaccttcttgtacttgggatattgatatctttctctaggtttgcaaagttctctgttattattgctttgaataaactttctacctgtatctctttttctacctcctctttgacaccaataactcttggatttgcccttttaaggcaattttctagatcctgccagtgtgcttcattgttttttattcttttttcttttgtctcctctgactgtgtattttcaaatagcctgtcttcaagctcacaaattctttcttctgcttgatcagttctgctataaaaagactctgatgcattcttcagtgtgttatttgtacttttcagctccagaatttctacttgattctttttaattatttccatctctttgttaaattcatctgatagaattcttgaatttctttcagtttcctcaacatggctattttgaattctctgtctcacatatctctgtttcttcaggattgatctctgatgtcttatttaattcatttggtgaggtcatgtattcctggatggtcttgatacttgtagatatttttctgcatctaggcattgtatttattgtagtctttacaacctgggcctgtttgtacttgtccttggaaaggctttccagatattttgaaggactcggatgttgtgatctacgttgtatctgctgtagggggccctgcaagcctagtaatgctgtgggtcttgtacacactcatggaggtaccaccttgatggtcttggacaagatctagaaggattctctggattaccaggcagagattctttttctagtccctttactttctcccagagtctctctctttctgttctgacccacataaagctggtgacacactccaccgcaactaggactttgctgggtaagacttgaagccagtacagcacttgcccagggcctgcagtaaccacttcctagctgccatctatatttgctcaaggctctggggctctacaatcagtaggtgagaaagccagccagacccgtgttcttctcttcaggttggcaagtttcccaaggccctgggttggtccagaggtgccatccagaagccagggactagagtaaaaaaccttagaagtctacctagtattgcattgtactgtgactaagctggcattcaaaccacaagacacagtccttcccatgctgtcttccccttttctaaggcaaaggagcctcacctcatggccaccaccaccacaggcccacagggagtactgccagtgtactgttaatattccaaggcccaaggactcttcagtcagcttgtggttaatgctgcctggcctgggactcacccttcaaagcagtgggctcccctctggcccagggcaggcccagaaatgctatccaagagccacatcctggaatcagggaccccaagcccagttggtgctctacctctctgtggctgtacctgaagccagcaagtcacagagtctcacccaaggcccatgacatactaattgggtatcacttctggtttttcagggcccaagggctcttcagttagtaggtgatgaattctctccagatgtcgttgtgaagataaaagaggtttattttcatgaaaacatatatactttaaagcaccttatgaaatgtatgtccattccaccatcaacatttttacctctgttgggaagataattccttttgactccacaataattatttatatctacacatgggaatgtttcttttttatttgtgtggttttggttttaaagcatttaatcattacaagactcctagaattactatatcatgtgctctctgaaggcaaagttcccatctaatttttctattttatctttctacctctaagacctaaaactcaataaatgtgcattaaggcagatatccttgggagaagtgacacagaaactatgtattcatgctctgtgtccattgtacttcactcagggttaagactgccttgatgagggcaagtgtaggaagactctgaggccatctgagagtaagtggtgaagacttaagaagtggggcaggaaacacagcaagagagagttgtcaggaagcagaaaagcagttggcaaaagcaaccactgaaggactggttttacctctaattcttcctggactggggataatcctagagggcttgtctctgtcagatgaacttttggtagcatttcccagaaccatgactcaaaacttgccactgtgttcccatctgggatttggaagataaggtaagaacttggaaagaattcaggggacacttagttaaattgggtcaaaatgtgtccattctccagcctccgtcttggcagtgacacattggaaaatggttccactatgactgaacagccagggaagagtacagcttatttatactctctgttttccactttattttctacaaactatgtcttttagaaataaactatcaatcttgcccagactggagaaaggactgcagcaacaaccctgtttcagtattctggaaaacggtttcccgcagggtaagtaccaagtagtgaaattctagagctttggagaccacagaacttaagacgttactcagtcagtgcttggttttaacacttttggattacaaatacttttaggaatgaaaatataggattcattcctgagaaaaaggttcagatgcacatgccagaaaatttacacatccaattttagaacattcttagagggtccatgggctccagttgcagaatctttgcacgtacccactctgactttggctaccaggaacctggggcttggtttaatcctctgattcaggtattagtcaatcttagatacctgggacagtcgtaacaatctacatgtatagaccccttactatgtggcaggtacggtcctcagatctttacatgaactagtaacttgcatcttcaccagaaccctgtgaagcaggtgccatgagtattgtaaccatttaacacataacgtgaaggtacaagtaaacaaggaatctactaaatgtacagaattagtaagaggcatatgtgggagtttatcccaagctgtctgactccagattcagaatctaggctgggaaaaactcaccactccaccctctacctattttttttaaaaaaattgatacataatagttttacatatttatggggtatatagtgatgtggtgatacatataaggtatagtgatgaaatcggggtaattaacatatctgtcatctcgaacatttatcatttctttgtgttgggagcattgaatatcccccttctggctagctgaaactacatattattaactgtagtcctcctacagtgttattgaacaccagaatttattcctcctatctaactataattttgtatcttttaacaaatctctacctatctcctcctcctcctacttttctaagcctatggtggcctctgttctgccttttacttccataagatcaacttaattttagcttccatatatgagtgagagtatgtagtatttaaccatctgtttctggcttacttcacttaacataatgccctccagttccttccatgttgctgcaaatgacaggaatacttttttttttttttttttttttttttttttgagatggagtcttgctctgtcacccaggctggagtgcaatggtgtgatctcggctccctgcaaccaccacctcctaagttcaagcgattctcctacctcagcctccccagtagctgggactgcaggtgtgggccactatgcccggctaatttttgtattttcagtagagacggagtttcaccatgttggccaggctggtctcaaactcctgacctcaggtgatccgccagccttggcctcccaaggtgctaagactacagccatgggccaccatgcccggctaatttttgtattttctgtagagacagggtttcactatgttggccaggctgtctcaagctcctaacctcaggtgatctacccaccttggcctcccaaagttctgggattacaggggtgagccactgcacctggccaggaatacattttttaattcctgaatacaattccattgtgcacatatacccccatctatttctaactttactcaaagctacctgtgtatatttatttatcttgtaagttgcttcagtgttaagtggacaaggaaacatttcttttcaagtgtgttagggaaaaaaagagaaaggaaggaagaaagaaatgaaagaaaaaggtgtgagtaacaatacactaattataactttcaaaattaaacttagacatctgaggaactggggcaggtggaaatgtatttgttaagtgcatatgtcttagtccatttgtgctgctatcacaaactacctgagacttggtaatttttttaaaacaggagttttattttctcattgtgctggatacttgggaaatccaggattaaggtgccagcagattcaatgtctggtgagggctgctgtctgcttccaaaatggtgccttcttgctgtgtccttacatggcagaggcagaggggctaaaggaacctagctagttccctggagccctttcataagggtgttaatcccattcatgagggcagaacccttagggcccaattatctcctaaaggactcactacttattaccatcacattggtcttaggtatcaacataagaaacacatacattcaaatcatagcagcatatctgtgacaagccttgaagtagttcctctgtcattcccattgagtcatccccataggtagtgtgacaaatccctacattaaaggtgaagaaactaagactcagaagttaagtgactcatccaagttccctgggctaataagttacagacctaagagcctaacctaggcctccctgattccaaagccatgctcttcaattttgttctttgaatctgcttattggttctgtcttttaaatgacaggtttgatcttaactctaggttggtacctagctaaatctctgtcttagggggattcatgtaaaccctggtacgatggaaacagaaaaacagcctggaagttgacataaggagaccatgtttaaacttgggcagattcctttactcattctgatcttctgattcctcatttgtcaaatggaaatcaaaatatacttgttccatagggttactgcaatgtttaaatgagataccaccatcctataacataacccaaaatccacccacttcaaaaataattcattgagtacttactatggacagtgaacattcatgggcactttatagtttttgtttgtttgctttttctgagaatagtttccatttcactactctatggtatgttttaggacagtgctgttgctaaaatcttttaaagccaagtcacattttatatgtatcaagaacctccttgcgttccccactcagtccctggcactaggaatacagaggtgcacgtgattgaaggcgtcctgcccttgtgagctaccagcacctttattttgccaatcactcatggatgtatgtggatggacttcttttttcagacttgtccctttctttttctgataacagaggctgtgtttttttttaatttttaatttttgtgggtaggttaaactcatcattataatacaatacagttggataatgtggagggaatgtaagatgctgtcagagtcagagaaggggacttgagctagtcccaggggttggggaggcctcctggagggagcatatagaacactattttgttcatttcatttttccaaagtctaacaaagattcctgctgaatgtttcttgcatggagaaataagaccctttgctcaagcatatttattcattcacttattcagtcctcctttctctctgtgcttttccaggcctaagggtcccctgttctctcctcaggttcccctcttatggtgttcccatttccctcatccctgaatcatccacctgttcccactaaatgaagcataatgtttacagtgcatgacactgagaaagcactttcatcttccccctctagacattcctcttactcctctggacttctgacttctgaaccactgaaccaccagctctatgaactataacactgaacattgttcacttagagattggagcaactgcttcaagaactctgatatgaagcataatccgtccagtggcttggaataaaaattgtgtagacctgacattcctgggctaaaaccatatgggatatccttccttaaccagctattgctaagtattgttttgaatgaaactgctggaggatggtgattaagtttgcatgatgaatggtgggcatttttttttttaagtttgcagaagctgcctgtgatgtggtccatgtgatgctcaatggatcccgcagtaaaatctttgacaaaaacaggtacacatttattttgcatcctgtttgcaagtatcctgttgcaaatatcacagtgaatatttcatctctagaaagaatatgcttttcatgtttcaggtcagttctgaagattagggccaaaaaaggtaaaaattttgaattccgtggagagagttgtctcctgtcaatgtgtttgtctgatttctcctttgccaaaaattgtctaccaggttctaatggccactgcactgtatctagcccctgctcttaacttttgcaggcctggtgtaattttctcagctttctctcccgttaccctccaccctacccattgctcaccattgttcacaccgttcccccatatgacctgcctcccctgctcccctgctcccttctgtctaaatcttcaccatccatgaagacctgccttgaccctcctctcctccaggaaaattgtgtaccccaattcagtagtaaaactactaccgggaacatcgggaactgtgctgggctcttggccttcactatctttttgcagacattgtcaacaatgtactgtagtggttgaaagcaggtactggcggtcattacatatcatctgtgtgacctcaggcagggcagtcaacctctgtgagcccctgaatatgtaccaaagagttgatggtgatgggaagattaactgagacaacagatgaaaaatgctgagctctgtgcctgacaacagagaaagtgctcaatgagaatcagctattattctcatttgctgatccttgccactgaatctggccacacctgtgccttccttggctgatctccttctatatttacagtttttactatgttgattaccttttcggcctttgttctctaatttttgttctctaatcccacataaggctgactgaaaggaggaagcatatattaatttgccttataaactctaggtgccccaaattaatttttcttctctcctgttttaatatttaattctacaaggaagcatttgtcctttcgtcttctgatcccaatttttttgggtaaaagcattaacatttcagaattttatgatctgatattatggttcaagcacttgaaacaggagtgtcagttgtcagagactaacagggaagagtttaggaatgggattagggcaggcaaccatagtctttcaaagcattgcctctcaaacttcactgagcatgtgaatcacgtggggattgttcaactgcagatcatttcagcaggttatagtggttgaaattctacatttcttttttttttttttttttttttttttgagatggcgtctcgctctgttgcccaggctggagtgcagtgacacggtctccgctcactgcaagctcagcctcccaggttcacgccattctcctccctcagcctcctgaataactgggactacaggcacccaccaccacgcccagctaattttttgtatttttagtagagacggggtttcatagtgttagccaggatggtctcgatcccctggcatcatgatctgcctgcctcggcctcccaaattgctgggattacaggcatgagccaccatgcctggctgaaattctacatttctaatgagttcccaggtgatgttcattaggttggtctaaggaccactcttcaaatagcaaatatttaaagaatcaacattaatgcacaaattaagaattttattttgagaatcttgttaaccgagggtcatgctgaataagaaaaggttattgactgatttgcaatttgatgtgtcaactctaaaggataggtcctagccagtgcctttctgcctgctggttgttgaggggggtgtggatgctttcgtttggggttgatgtttggggttctttgtttcttctattttagcacttttgggagtgtggaagtccataatttgcaaccagagaaggttcagacactagaggcctgggtgatacatggtggaagagaagattccaggtatatcttactactttgtacccaagtgttattttatgaatcagtccacaaaagaatccacagtcacaagcacgcactgggaacaaattgactcaggaaatgaaactacatgaatgtgcatgaatcccaacagcctcttaactttatctccacaaaggatatttaactgcttgacacttcagctctcctgctgacccaggagctcttagaggatttacctctactttacctctttatccaagggccttgtccagggcgtgctacaaaaacaaagagactccaaaaatgtttgtgagatcttgtaattttaatactttcttctttcttccccagagacttatgccaggatcccaccataaaagagctggaatcgattataagcaaaaggaatattcaattttcctgcaagaatatctacaggtaattaatttcttcttgaagaaaaaaatgactgtcttgtcacctgtagaatttccttttttccttagcctcctctgagcttggagggctgtgtgaatctttcttgggccttgatgatgatcacagatggcaacctctggtgatctctgtccctccttccaagccgagtccagaaggtatccaagctagtggccttcacttggctgcctttcctcatccgtctctattgatcccaagtaggacttgcctctaaagctgacacaacctttgatggcatattttttcattcccagtgtgagtggcccagtccagggttcactggcctactaggtttcaggggagcaagggaatgttttgctaagccctttctcccaagttgtaaaatccttgtgacttgacatcattttgcaagtgaagcttccttagttggatctgagtacagatgcctaacacatgacaaggcgtcacacggcagtctaccaaaatctatattttttaaattaaaaaaaaaagtatttacaaaatttttctgataatttgtgtttattagaaaacagtttaaaattacagatagatatatattttttaaagtcacatataattctagtttcaaaactgagacccctcactcatttttaagcagttgtgaccaatggtgtaggtaggtactcattggtagaagcatctttggagatttttccacgtataatagcttggaacaagattgatgcagagaggaaaagctgttcaaaggaggtagaagctgagatgctagaatattgttcctgtttccatgtcactaccttctctcactaaccacatcagaaaagcagaaggatagattctggagactctactgatggcttttgtttcccaaatgacctgaattccccatgagtcaccttgcttctatctggaaacagccagaaaaggccatgagcattctacagcagttagacaggaaaacagaaagaatgaatgaaggagcaactgtaaaagcaatcttgcggcggaggagccaagatggccgaataggaacagctccggtctacagctcccagcgtgagcgacgcagaagacgggtgatttctgcatttccatctgaggtaccgggttcatctcactagggagtgccagacagtgggcgcaggccagtgtgtgtgcacaccgtgcgcgagccgaagcagggcgaggcattgcctcacctgggaagcgcaaggggtcagggagttccctttccgagtcaaagaaaggggtgacggacgcacctggaaaatcgggtcactcccacccgaatattgcgcttttcagaccggcttaagaaacggcgcaccgcgagactatatcccacacctggctcagagggtcctacgcccacggaatctcgctgattgctagcacagcagtctgagatcaaactgcaaggcggcaacgaggctgggggaggggcgcccgccattgcccaggcttgattaggtaaacaaagcagccaggaagctcgaactgggtggagcccaccacagctcaaggaggcctgcctgcctctgtaggctccacctctgggggcagggcacagacaaacaaaaagacagcagtaacctctgcagacttaagtgtccctgtctgacagctttgaagagagcagtggttctcccagcacgcagctggagatctgagaacgggcagactgcctcttcaagtgggtccctgacccctgacccccgagcagcctaactgggaggcaccccccagcaggggcacactgacacctcacatggcagagtattccaacagacctgcagctgagggtcctgtctgttagaaggaaaactaacaaccagaaaggacatctacaccgaaaacccatctgtacatcaccatcatcaaagaccaaaagtagataaaaccacaaagatggggaaaaaacagaacagaaaaactggaaactctaaaacgcagagcgcctctcctcctccaaaggaacgcagttcctcaccagcaacagaacaaagctggatggagaatgattttgacgagctgagagaagaaggcttcagacgatcaaattactctgagctacgggaggacattcaaaccaaaggcaaagaagttgaaaactttgaaaaaaatttagaagaatgtataactagaataaccaatacagagaagtgcttaaaggagctgatggagctgaaaaccaaggctcgagaactacatgaagaatgcagaagcctcaggagccgatgcgatcaactggaagaaagggtatcagcaatggaagatgaaatgaatgaaatgaagcgagaagggaagtttagagaaaaaagaataaaaagaaatgagcaaagcctccaagaaatatgggactatgtgaaaagaccaaatctacgtctgattggtgtacctgaaagtgatgtggagaatggaaccaagttggaaaacactctgcaggatattatccaggagaacttccccaatctagcaaggcaggccaacgttcagattcaggaaatacagagaacgccacaaagatactcctcgagaagagcaactccaagacacataattgtcagattcaccaaagttgaaatgaaggaaaaaatgttaagggcagccagagagaaaggtcaggttaccctcaaaggaaagcccatcagactaacagcggatctctcggcagaaaccctacaagccagaagagagtgggggccaatattcaacattcttaaagaaaagaattttcaacccaaaatttcatatccagccaaactaagcttcataagtgaaggagaaataaaatactttatagacaagcaaatgctgagagattttgtcaccaccaggcctgccctaaaagagctcctgaaggaagagctaaacatggaaaggaacaaccggtaccagccgctgcaaaatcatgccaaaatgtaaagaccatcgagactaggaagaaactgcatcaactaatgagcaaaatcaccagctaacatcataatgacaggatcaaattcacacataacaatattaactttaaatataaatggactaaattctgcaattaaaagacacagactggcaagttggataaagagtcaagacccatcagtgtgctgtattcaggaaacccatctcacgtgcagagacacacataggctcaaaataaaaggatggaggaagatctaccaagccaatggaaaacaaaaaaaggcaggggttgcaatcctagtctctgataaaacagactttaaaccaacaaagatcaaaagagacaaagaaggccattacataatggtaaagggatcaattcaacaagaggagctaactatcctaaatatttatgcacccaatacaggagcacccagattcataaagcaagtcctcagtgacctacaaagagacttagactcccacacattaataatgggagactttaacaccccactgtcaacattagacagatcaacgagacagaaagtcaacaaggatacccaggaattgaactcagctctgcaccaagcagacctaatagacatctacagaactctccaccccaaatcaacagaatatacatttttttcagcaccacaccacacctattccaaaattgaccacatagttggaagtaaagctctcctcagcaaatgtaaaagaacagaaattataacaaactatctctcagaccacagtgcaatcaaactagaactcaggattaagaatctcactcaaagccgctcaactacatggaaactgaacaacctgctcctgaatgactactgggtacataacgaaatgaaggcagaaataaagatgttctttgaaaccaacgagaacaaagacaccacataccagaatctctgggacgcattcaaagcagtgtgtagagggaaatttatagcactaaatgcctacaagagaaagcaggaaagatccaaaattgacaccctaacatcacaattaaaagaactagaaaagcaagagcaaacacattcaaaagctagcagaaggcaagaaataactaaaatcagagcagaactgaaggaaatagagacacaaaaaacccttcaaaaaatcaatgaatccaggagctggttttttgaaaggatcaacaaaattgatagaccgctagcaagactaataaagaaaaaaagagagatgaatcaaatagacacaataaaaaatgataaaggggatatcaccaccgatcccacagaaatacaaactaccatcagagaatactacaaacacctctacgcaaataaactagaaaatctagaagaaatggatacattcctcgacacatacactctcccaagactaaaccaggaagaagttgaatctctgaatagaccaataacaggctctgaaattgtggcaataatcaatagtttaccaaccaaaaagagtccaggaccagatggattcacagccgaattctaccagaggtacaaggaggaactggtaccattccttctgaaactattccaatcaatagaaaaagagggaatcctccctaactcattttatgaggccagcatcattctgataccaaagccgggcagagacacaaccaaaaaagagaattttagaccaatatccttgatgaacattgatgcaaaaatcctcaataaaatactggcaaaccgaatccagcagcacatcaaaaagcttatccaccatgatcaagtgggcttcatccctgggatgcaaggctggttcaatatacgcaaatcaataaatgtaatccagcatataaacagagccaaagacaaaaaccacatgattatctcaatagatgcagaaaaagcctttgacaaaattcaacaacgcttcatgctaaaaactctcaataaattaggtattgatgggacgtatttcaaaataataagagctatctatgacaaacccacagccaatatcatactgaatgggcaaaaactggaagcattccctttgaaaactggcacaagacagggatgccctctctcaccgctcctattcaacatagtgttggaagttctggccagggcaatcaggcaggagaaggaaataaagggtattcaattaggaaaagaggaagtcaaattgtccctgtttgcagacgacatgattgtttatctagaaaaccccatcgtctcagcccaaaatctccttaagctgataagcaacttcagcaaagtctcaggatacaaaatcaatgtacaaaaatcacaagcattcttatacaccaacaacagacaaacagagagccaaatcatgggtgaactcccattcacaattgcttcaaagagaataaaatacctaggaatccaacttacaagggatgtgaaggacctcttcaaggagaactacaaaccactgctcaaggaaataaaagaggacacaaacaaatggaagaactgctcatgggtaggaagaatcaatatcgtgaaaatggccatactgcccaaggtaatttacagattcaatgccatccccatcaagctaccaatgactttcttcacagaattggaaaaaactactttaaagttcatatggaaccaaaaaagagcccgcattgccaagtcaatcctaagccaaaagaacaaagctggaggcatcacactacctgacttcaaactatactacaaggctccagtaaccaaaacagcatggtactggtaccaaaacagagatatagatcaatggaacagaacagagccctcagaaataatgccgcatatctacaactatctgatctttgacaaacctgagaaaaacaagcaatggggaaaggattccctatttaataaatggtgctgggaaaactggctagccatatgtagaaagctgaaactggatcccttccttacaccttatacaaaaatcaattcaagatggattaaagatttaaacgttaaacctaaaaccataaaaaccctagaagaaaacctaggcattaccattcaggacataggcgtgggcaaggacttcatgtccaaaacaccaaaagcaatggcaacaaaagacaaaattgacaaatgggatctaattaaactaaagagcttctgcacagcaaaagaaactaccatcagagtgaacaggcaacctacaacatgggagaaaattttcgcaacctactcatctgacaaagggctaatatccagaatctacaatgaactcaaacaaatttacaagaaaaaaacaaacaaccccatcaaaaagtgggcgaaggacatgaacagacacttctcaaaagaagacatttatgcagccaaaaaacacatgaagaaatgctcatcatcactggccatcagagaaatgcaaatcaaaaccactatgagatatcatctcacaccagttagaatggcaatcattaaaaagtcaggaaacaacaggtgctggagaggatgcggagaaataggaacacttttacactgttggtgggactgtaaactagttcaaccattgtggaagtcagtgtggcgattcctcagggatctagaactagaaataccatttgacccagccatcccattactgggtatataaccaaatgagtataaatcatgctgctataaagacacatgcacacgtatgtttattgcggcactattcacaatagcaaagacttggaaccaacccaaatgtccaacaatgatagactggattaagaaaatgtggcacatatacaccatggaatactatgcagccataaaaaatgatgagttcatatcctttgtagggacatggatgaaattggaaaccatcattctcagtaaactatcgcaagaacaaaaaaccaaacaccgcatattctcactcataggtgggaattgaacaatgagatcacatggacacaggaaggggaatatcacactctggggactgtggtggggtcgggggaggggggagggatagcattgggagatatacctaatgctagatgacacattagtgggtgcagcgcaccagcatggcacatgtatacatatgtaactaacctgcacaatgtgcacatgtaccctaaaacttagagtataataaaaaaaataaaaaataaaaaacaactctcagaagcaaaaaaaaaaaaaaaaaaaaaaaaaaaagcaatcttgcagatatctgacgagtctaagctgttcaaagatatgttgcatggagaaaatagaatagtagaaacctagacaaagactgggaaataaagatggtcttatccccaatactcttttaccttttttgtcttatgaaacattaacctttttctcataaatgaccagaagacctttatattataattcgtcaactcccctcatttgtgtctgctttaggctccaagtgagctcactcattctccatctggaaagaaaatatgggcatggcttccatttggacttgtacagacagtggcccataatgggaaccaggtgacacatcacaagggcaggttctgacacctcttccttccagaagcccaggggtgctggcagctgcttctgaggatctctctcttccttggctcatatttagcaaaatcaaatttaaagaaccccattcctcgctatccaccatccccctattcatgtgccagccactcctattggatcctgttgctttagctaatttttatgaaaataatagtcattcacctgttaggtacttatctaaggtttgtttcaaagcaagtttggtccccttgctgagggtctccagctttttcccagactctgcctctgaccctggattcaacattccctcaggaagcttcggaagagaggaaagcaaattagccacagaagctgtgggggtccgtggccttggttgctgctcctgctgtttttttgaccagcaggtggcatggatagctcccctcccgacatgtcactgcaggagaggagtttatatggatgctaagtggtctgtgcaccttgtcgtcgctaaaaaaggggcttcctccattagcgaattggacgacagatgtatcctacggtctcttgatttccttttttgctttcttgtcatagacctgacaagtttcttcagtgtgtgaaaaatcctgaggattcatcttgcacatctgagatctgagccagtcgctgtggttgttttagctccttgactccttgtggtttatgtcatcatacatgactcagcatacctgctggtgcagagctgaagattttggagggtcctccacaataaggtcaatgccagagacggaagcctttttccccaaagtcttaaaataacttatatcatcagcatacctttattgtgatctatcaatagtcaagaaaaattattgtataagattagaatgaaaattgtatgttaagttacttcactttaattctcatgtgatccttttatgttatttatatattggtaacatcctttctattgaaaaatcaccacaccaaacctctcttattagaacaggcaagtgaagaaaagtgaatgctcaagtttttcagaaagcattacatttccaaatgaatgaccttgttgcatgatgtatttttgtacccttcctacagatagtcaaactataaacttcatggtcatgggtcatgttggtgaaaattattctgtaggatataagctacccacgtacttggtgctttaccccaacccttccaacagtgctgtgaggttggtattatttcattttttagatgagaaaatgggagctcagagaggttatatatttaagttggtgcaaaagtaattgcaagttttgccaccgaaaggaatggcaaaaccacaattatttttgaaccaacctaataatttaccgtaagtcctacatttagtatcaagctagagactgaatttgaactcaactctgtccaactccaaaattcatgtgctttttccttctaggcctttcataccaaactaatagtagtttatattctcttccaacaaatgcatattggattaaattgactagaatggaatctggaatatagttcttctggatggctccaaaacacatgtttttcttcccccgtcttcctcctcctcttcatgctcagtgttttatatatgtagtatacagttaaaatatacttgttgctggtactggcagcttatattttctctcttttttcatggattaaccttgcttgagggctttaacaattgtattactttttcaaagaactaagctttagcttcattgatttttttctatttaattgggttttgctcttctctttagcattggaaacatagaaatgctttctgatttctttgggtagatttacgtattcagcttcttgagatggaagtttagatcactgatccttcagcttgttttcttttttgtatacatagattttaggacgatatattttcccttgagttctgctttagctgcagctcttatgttttgatatgcctctctttattatccttcagttaaaaatatctttcaattcattgttatataaaaatatgtgcctagtttttaacatctggagattttctagttttgaaaaaaacataagccaggcatggtggctcacacctgtatccccagcactttgggaggccgagacgggaggatcgcctgagctcaggagtttttacaccagcctgggaataacagtgagacattatctccaaaaaaattacctgggtatggtgttgtgcacctgtagtcccagctactctggagactgaggtgggaggattgtttgagcttgggaggttgaggctgcagggagctgtgatcacaccactgcactctggcctgagtgacagattgagaccctgtctcaataaaagcaaaaataaagaaaataaaccatatgtgttgaacaaaggattaataaattaatttgagactccttcagggaatgaccacaatttattgaaaatagcctaaatgttggagtcaggcatttctggattcatattttgacatcatgctgtcatcttgaacaaaatgcctaacctttctgaacttcaacttccttgccactcaaataaggattacaaaacttaaaatgtggtaagtactaaagacgacagcaaaaattgagtccagcacagagcttcctaaataagcaagcactcaacagagttggttcctttcttcctcccctgcttgacaatccagtttcccacaggagcctttgtagctgtagccaccatggtcagtccagggattcttcactagccccttctcccctggcagacatccttgtgggagtttagtcttggctcgacatgaggatgggggtttgggaccagttctgagtgagaatcagacttgccccaagttgccattagctccccctgcagaatgtcttcagaatcggggcccggtcagtctcctgggtgacctgctgttttcctcttaagatcctttccactttggttgctgctttcgggactcatcgagtccttgctcaacaggataccccttgaagtggctgcctgggccacatccccttccaaacaagaaatcaaaatattagaaatcaatttttgaaatttcccctaggaagactcatttgagtgttcaagttcagagccagtggagaccttaggggagggtggtcacaaggattttgcacagtgctttagagggtcccagggagccacagaggtggtgaggggctgggtgctcttttctccgtgcatgaccttgtgtgtctatcttcattaccacaatgcctcatctctacctcctttccccctgtagttccaacgtgggtatctttgccatctctggcccgaaggactttctgacctacatgtataaataccccctcacaatatatattacttttcctataagtgacttctctactggattactggttgctcatacacctcatattttactcgtaaatctactactccctgtctgcctactccattctcatttgctgtagaaaattctcttaccatcccaactttcacccaccatcatgcttacccaaaggctgtgggaatgacctgggccctaatgccccttttctaaattcctaaggctcaccattttcctattgtaatggttcttgaccttataatgtttgaggcaccttttcaaatatagtcctttgatttcagactgaatacttgaaaggacacacacacacatacgtaagtgcatatgactgcatacacccacacacacacacgtgcctgtatacagtcatatgatacatacacaaacacacgcacacaagcctgcatacatcatatgccaacagtggggatatgttctgagaaatgcatcattagatgattttgtcattgtgtgaacatcatagagtgtacttacactaacctagatggtctaacctactacacacccaggctacatggtatcacctattcctcctaggctacaagcctgtacagcgtgtgtctgtactaaatgctgtgggcaattttaacctgatggtaaatgtttgtgtatctaaacatatctaaacatagaaaaggtacagtaaacatgcagtattataatcttatgagaccgtcatcatatatgtggtccactgtttgggccatcattggctgaaaagcggttatgcgacacatgactgtatatatactttcctgttacaacaacagtgtctctcaatccacagtaattgcagcatccagtaggtcttactttagccctgagtcaccatttgtgtcaacgtgtttagtgccatgtccacgtctctcatgtaactggcagagctatcaaatattttggcaaaacacattgtttctttggctttgccttggtaactttctgtgccttttgtagctcttgtttggaagaagctcaacccatgtctgcacactgtgatacaagggggacagcatcgacatcgacttacttcttggtgccttattcctccttagaacaattcctaaatctgtaacttaagtttctcaggaagattccatactgcacagaaaactgcttttgtgggtttttaaaaggcaagttgttatatgtgctggatagtttttaagtatgacataaaaattgtataaagtaaaatattaaaatacacctagaatactgtataactttaagtcattttatcaacacattgctaatccagatattttcccgcagtttttctttgaataacagagcaattaatttacttttactatgaagagtcatcattttagtatgtattttaagcaatccaccaagaactcagtaggcagctgagaggtgctgcccagagaagtggtgattagcttggccttagctcacccacacaaagcacaacaggctttgaactattccctaacggggcatttattctttttttttttttttttgtgagacggagtctcgctgtcgcccaggctagagtgcagtggcgcgatctcggctcactgcaggctccaccccctggggttcacgccattctcctgcctcagcctcccaagtagctgggactgcaggcgcccgccatctcgcccggctaattttttgtatttttagtagagacggggtttcaccgtgttagccaggatagggcatttattcttgaacttgattcagagaggcacacattaccattctctaatcagaatgcaagtagcgcaaggcagtggaaactatggaattcggaggcaggtgatgcattgggcgagtttattaacatctgtgactctctagtttgaaatttatttgtaacagacaaaaatgaattaaacaaacaataaaagtataataaagaactgtgctgaataattcttttaaaaggagttgtctctgggcttgaaagaactaagggacatgttcagtgggtggcacattgctgaagacaacaggacttcctacctactgcactacacgattgagtgagttaggtagctggggaaaggatgggtcactgtcctggtgtgtctcagtggtggaataagcgggaatagatgccaacaagagtccagtgctactgtctacaaagacctgaaaatccttactcacacctctttattcttcaacacattgaagaagaatgttgtttgcttttcagtaggagtctcacattcgagaatcacgtgatgacgcatcttttattctctattaaggagactcaccttgagacctcacaggatttaacataatgaaaacaacatgtgtgattatttttttaaaaaaaacttttaagttcaggcatacaggtgcaggcttgttacacaggtaaacttgtgtcatgggggtttgttgtacagattatttcatcacccaggtattaagcctagtacccattagttatttttcctgatcctccccctcctcacaccctccatgctccaataagccccaatgtttgttgtttctcactgtgtcccaagtgttctcatcatttaacgcccacatataagtgagaacatgaggtatttggttttctgttcctgcattagtttgttaaggataacagccttcagccctatccatgtccctgcaaaggacgatcttgtgtgtgattcttaataagtgacataaacatgaaacaacacttaaagacttgatgcaaaagacctggcagggtggctcgtgcctgtaatcccaacattttgggaggtcgagaacggaggattgcttgagcccaggagttcgagaccagcctgggcaacataatgagatctcatctctgaaaaaaactaaacaaaaattaaccaggcatggtggcatgttcctgtagtcccaactacttgagaggctgaggtgagaggattgcttgagcccaggagatcaaggctacagtgagctgagattgtgccactgcactccagcctggacaatagaaatttagttgctgtctcaaaacaaacaaacaaacaaaacaaaaaacaaaaaaacttgatgcaaaatgccagcctgcagaaaagagaaaaccaatgtttattgtacaaggtacttcacacattgtatcagcctgtgctctcagctgcaacaacagaacaccactctggctgtgtattagggttctctagagggacagagctaaagacagatagatatatgaaagggagtttattaaggtgtattgacttgcatgatcacaaggtgaagtcccacaataggccgtctgcaagctgaggagcaaggaaaccagtccgagtcccaaaatctcaaaagtagggaagccagcagtgcagccttcagtctgtggccaaaggcctgagagcccctgacaatccactggtgtaagtccatgagtccaaaagctgaagaacttggaatccgatgttcgggagcaggaagcatccatcatgggagaaagatggaagccagaagactcagccagtctagtcctcccacgttcttctgcctgcttttatcctagctgcactgatagctgattagatggtgctcacctagattgactgtgggtctgcctctccgagtccactgactcaaatgttaatctcccttggcaacaccctcacaaacacacccaggaacaatactttgcatccttcagtccaatcaagttgacactcaaccatcacaggctgaaagtgaattctctaaaaactatcaagagcttatagattgtctgggagggcgagaaaatagtttggaagccacttagccaagaacaacactccagattactctactggcttgtcaggtagaaaagttgccgcttgccctatggacacttggctgtcgctctatcactgccagaacacagacatggctatttctgggaacagaagtaatgaaagagaatggtggatggtgcatggcacctgctttccttcctcaccagccacagattcacggttgcacagatacattcagtgtgtagggcctgatacaggtaaaatgcttaggacagagctcagtttctctgtctgtaaaatgggagtgataagagtgtctatcattttgggttgttttgagcattaagtaaggtgatatgtgcaaaatttttaggataatgcttaatacatatgaagaactgtatcaatgttaggatttttatttttttatttttattttattttatttttgagactgtttttattccggaggaaattccttgacaagcctacctagtttagatgctgagaccctgagacctaggggacaatggagaagagggtagagaatggctctcttgccaaccaacaggatcagctatagtctctcacaagctttgaatcattctagatgattagaactttcccacctaagagagaaatgggccagatacctttcactaagagctggcccatcccaagctggaggttgacaaaaatgcagcaatagactccactgctcccaaatctaagaagttcaaatgtataaatttcatccttcaagctgatcaagagttcaacagcctcccttagcattgccagttcaagcccctgctctcctgaccaggtacttactgctctgatgatggttaaggcacgcagccttccttggtgcaacgaagccagaagacaagatgtgctgggagtagaaatcttctccctgtggaatcagtgagctgaaagaacattgagaaagcaggagagctaagaagaaatgggacagctatctctgaccttctgcacaagaacaaatctcccgttgtgaataatatttaataattggttcagttttcccagccttgccttccagggaattttcctgcactggtagaataatcagatacaagttggagggaaagatgccctgtgggagctgctgctaagtcccagattcttcttagacgctcagaatttgatgactttggcgctgggccacagaagtcatgagcttctccaggcacagcttgtttggcctggtgatgtgagaggaaggaagcaagctgggatctcatcaggtgtccttcctgctgtcagccttttagaacacgggtgactctgtgctatcagatgggattatttttaaaatgtatttttttgtttttgtttttgttttgagacggagtctcactctgtagccaggctggagggcagtggcgtgatctcggctcactgcaacctccgcctcccaggttccagcgattctcctgcctcagcctcctgagtagctaggactacaggcacgcaccaccatgtccagctaatttttgtatttttagtagagacaaggtttcaccatgttggccaggatggtctccatctcctgaccttgtgatccgcccccctcggcctcccaaaatactgggattacaggcgtgagccactgcgcccggcctgttgttttctaagtgtcactcattaccatgaacatgtcaaatacttccacagtaaaagtaacaaaatagacatttctgtaataatttattacagaatcatgaaagaaccatggaacacaatgatggcacatcagtggctcatctcctttacttgacaagtgaagatactaagtccttctggggttgtggaaggtgtgtggagttgtgagcaatagtttaggagtcaaggttttctccttccatgtctttctttcctatcaaaaagcctaagaatccacaaacaggtgtggtggagattgctaactgttgcctagtatgtgttcttttcttctttttttaaaaaaaataaacagtatttccccatctgccatttttaatcagggcatgacttcacggctagagaacagatcccagctctgcagctggctctggccaatagggtatgaatggagatgattaatgcaattgcctagtcaccttagaaacagccacttgctctaaattttcattttttttaattatactttaagttctagggtacatgtgcgtaacgtgcaggtttgttacatatgtatacatgtgccatgttgatatgctgcacccattaactcgtcatttacattaggtatttctcctaatgctatccctccctccctccctcccccgaccccacgacaggccccattgtgtgatgttccccaccctgtgtccatgtgttctcattgttcgattcccacctataagtgagaacatgtggtttttggttttctgtccttgtgatagtttgctcagaatgatggtttccagcttcatccatgtccctacaaaggacatgaactcgtccttttttatggctgcacagtattccatggtgtatatgtgccacattttcttgatccagtctatcatcaatggactaaattttcacttttatctcctttactttgctgaaaaacaatgaaatttcagcagcagccttggacttagaaaatggaagccataagcagagggtaccaaactctagaaaaagatacttctctcttcctctcttcctctgatctagtttcacccagaatctcatttccatgatggctagacctggtctttttcttcattgctttatcctcaatcccagacacagagcagaaactcagtcagtatttgctctcagggcttttgtctccataatgccttctttaatcctcaccgctgtagctcagtttctttgtccagacttggctttgctggccactttagcctcactattaaataattgacctactgattatttgatcaccagtattagctgatccttttctaggtgcaaggtgctggtgacagagtattgacagaaacaggcatgggctactgccgtggagcagatggcccactccctgtgtattcaagggggaatctctacttcagcctgaacttggtaaaagtcatttcccccatacccctttccagctgcccactgtgttgtctggaaaactctggtcttttaggaggactgagaatgagatggttaggactgtcaatgacacaaacatgccccatgagcacaaagtacaatttggggtgatgtgagagggatgatgaaagcttccccaaacaggggagattgagagttttcctttaaaatgtttttatttttaaccaagttaccatttctttgatgtaagcaatacagataataaaaaataaagacaaaatcattgaaatatatcagtgctatactttctactcattgataatcttaccacccaggttaccagtggttaccactgataacatcttatgtatatattgtacacttttcatataaatcatatttttcatagaaaaacaatcctaaaattcatatggaacaaaaaaagagaactaaatagccaaagcaatcctgagcaaaaagaacaaagctggaggcatcacactacttcacttcaaaatatattacaaggcttatagtaaccaaaacaacatggtggtatggctcacgcctgtaatcccatcactttgggaggccgaggtaggtggatcatgaggtcaagatatcaagaccatccttgccaacatggtgaaaccccatctctactaaacatacaaaaattagctgggtgtggcagtgcaggcctgtagtc

SEQ ID NO: 161 - DNA, 1164 bp, Homo sapiens
atggccaactgcgagttcagcccggtgtccggggacaaaccctgctgccggctctctaggagagcccaactctgtcttggcgtcagtatcctggtcctgatcctcgtcgtggtgctcgcggtggtcgtcccgaggtggcgccagcagtggagcggtccgggcaccaccaagcgctttcccgagaccgtcctggcgcgatgcgtcaagtacactgaaattcatcctgagatgagacatgtagactgccaaagtgtatgggatgctttcaagggtgcatttatttcaaaacatccttgcaacattactgaagaagactatcagccactaatgaagttgggaactcagaccgtaccttgcaacaagattcttctttggagcagaataaaagatctggcccatcagttcacacaggtccagcgggacatgttcaccctggaggacacgctgctaggctaccttgctgatgacctcacatggtgtggtgaattcaacacttccaaaataaactatcaatcttgcccagactggagaaaggactgcagcaacaaccctgtttcagtattctggaaaacggtttcccgcaggtttgcagaagctgcctgtgatgtggtccatgtgatgctcaatggatcccgcagtaaaatctttgacaaaaacagcacttttgggagtgtggaagtccataatttgcaaccagagaaggttcagacactagaggcctgggtgatacatggtggaagagaagattccagagacttatgccaggatcccaccataaaagagctggaatcgattataagcaaaaggaatattcaattttcctgcaagaatatctacagacctgacaagtttcttcagtgtgtgaaaaatcctgaggattcatcttgcacatctgagatctgagccagtcgctgtggttgttttagctccttgactccttgtggtttatgtcatcatacatgactcagcatacctgctggtgcagagctgaagattttggagggtcctccacaataaggtcaatgccagagacggaagcctttttccccaaagtcttaaaataacttatatcatcagcatacctttattgtgatctatcaatagtcaagaaaaattattgtataagattagaatgaaaattgtatgttaagttacttcacttta

SEQ ID NO: 162 - protein, 300 aa, Homo sapiens
MANCEFSPVSGDKPCCRLSRRAQLCLGVSILVLILVVVLAVVVPRWRQQWSGPGTTKRFPETVLARCVKYTEIHPEMRHVDCQSVWDAFKGAFISKHPCNITEEDYQPLMKLGTQTVPCNKILLWSRIKDLAHQFTQVQRDMFTLEDTLLGYLADDLTWCGEFNTSKINYQSCPDWRKDCSNNPVSVFWKTVSRRFAEAACDVVHVMLNGSRSKIFDKNSTFGSVEVHNLQPEKVQTLEAWVIHGGREDSRDLCQDPTIKELESIISKRNIQFSCKNIYRPDKFLQCVKNPEDSSCTSEI

SEQ ID NO: 163 - DNA, 65952 bp, Mus musculus
  misc_feature (1)...(65952): n = A,T,C or G
tttgcttctaagtgacaaactcatgataatattaatatcaattttccatagagccatcatggggaagaattcgataagatattatctttgctaatgattctaggtgtgttttttttttttttacaatatctatgtatactgtagtgtcttcagacacaccagaagagggtgtcagatctcattacgggtgattgtgagccactatgtggttgctgggatttgaactcaggaccttcagaagagcagtcagtgcttctaactgctggaccatctctccagcccttattttggtctaaagtatttgtttgtctgttcattttagtcaggtctctatcttttttggctgacctggaactctctatgtagaccagtctggcctcaaacttacagagatctatctgtctttgcatccttggggctaggatttaagacacatgccaccatgctcagcccttaacattgtttttttttttttttttttattgttttgtgtggtttttgtttgtttgtttgtttatttttgtgagtgagggtggtgcatgcaagctactacaataatagtttctggaagttcgagggcaacttgttggttctgtccaagtcatagacttgattgatatagcaagcccctttgctggctgggctatctcgcagcagccactctagaaggaagtgtatgattactgccttccacccagctccagaatctggaattttgctcaagtgttccttccttgaggagccccactctggaaaagatgacaccataggtagtttttcttagcatcatggaccgagtgaagctcccacgacttcgggtggtttcatagccaaggctgcggcagagcctagcagagggagggctggaagttctcatcgctctctcatccagcactgagatctcaccaactttccttagcgtacggaggatgactccaaacagtttcaccttgaggtgtaacctcaggtttgctgagggctaacatcgaactggacggtctgctaggagcgaggcttaggcacgggtgggtagatgtgactaaattctctctggaagattggtttcaagcaacgggttgtgaacgcgttagggtgaatttagattctgacctggcctcttgtgccctctagtggtctaaaacctcagaacttgtcactcaaccaaggttgttcccgcccccccccccccccatggctaaatcgctataaccttttagccatctgttgcatagtgaattcagttcataactacgcttacaacacagtaaagcaattaactaaacacacacaataagagacctgacacatcttgtggggtctttgaaaggtcttcggtgtcttattttgtggtgtgcaaacccaataagctgtaagtccttagtggataattgaaacgatgctcgaatcagaggcagtccctctctcattgtcagtctgtgaaagattagctcgcgaagaagaacaacagcatgcaggcctgttatctggtgagatagtgccactccccgtgatgacggtaaagcctcagatttgagggagccaccggtttaaagtctcagttttgttcagattccaagatagcagccaacctggaggtgcgtgtgggggttatctcttgaacaatgtcagcttcttagaggagtgtgttcaatatcataacatcacagtcctttgggggcgctgcaatcctttttcaggacggagattacagcgctgtctccacactaccataaacaggcacacccatgtaacctacaagctatgaatgacttaagaacaagagcaaatgtagctctctctctctctctctctcacacacacacacacaaaagagagagagagagagagagagagagagagagagagagagagagagagagaatgtgtgtagagctcacgatgttggagctttgagcatgctgggtaaacaccctaccatcgagtttacccctacctcgaaagcagcacctagccccgggattgctcagagctctagctatcaccttcaaggaaaattttgtaactctggttgcccatggtggcttcaagcacctggtggcctcatagtgctgttcacacctgctgtttagttagggcctagtttgttttctgtctgtctccccagcccaaagctaagcctcggtatggcagctgtctgtccatgacagcatcattgagtctatcacagttctcacccaggaggtgttaaataagcatttgccaacttcaacagccccttggggtagatgctggaggaggcaggccaaaggcaagggtgatttccattcttatactaagtggcacagaaaggcaggtgcttgaagactcagaggcagccactcagaaggctgagctgtgcacccacagaaaggagcgagctctttgcatctctccagctcccactaccctttcaaagaaagtaaatgccttgaggttctagagcggctgttagaaaagactgcggctgtctggctgtctgtgaagacagagaaggatggttgtgcctgtaaagctgactgacggtgtgactctgaggctggcagagcccttattaagcgtgcagagactctgggttagaacccagcacctcataaacaacaagcaaactggaactgctttttgatcctgttacatgcctgtagactcacagctctacttaggagtctaaagaaggctgcttgagctaaggaaccaaagcagcagcagcaggagagagagagagagagagagagaaagagagagagagagagagagagagagagagagagagagagagagagagagagagagattatggacattatgttatctcttctgcttacttactttccaaagataaagatgcatcggcacaatggtgtgtgcctggtgatctctggccttaggaggtcactgaaatcagaagttggaggtcagtctggtgtactactaagcccctgtccaaggaaggaaaagaaaagaaaagaaaagaaaaggagaggagaggagaggagaggagaggagaggagaggagaggagaggagaggagaggagaggagaggagaggagaggagaggaaaggaaaggaaaggaaaggaaaggaaaggaaaggaaaggaaaggaaaggaaaggaaaggaaagggaaaagaaaagaagagaaaagagaagtcaaaccagcaaacaactcctcccacttaaacaaccacaagggaaccagaacagagaaaagaaagacagtgtggaccagcagagggccagcaagcatgatctcaaagctgtaaaactgcagaaagcttgactgagcacagggcagagcagcatcctgggccaggcctttttgtggggctgcagcgctctcatctccagttatttttgtttgttttttgagtgaatgagtgaggttgtatctggagttacagtgagtaaatgtcttagcggttaggatcaagtggtgctgcaacagaaaactccagaaggaggttttgttattgttgttgttttgtttttgtttttgtttttgtttttttgtttgtttttttgtttttttggttttttttgagacagggtttctctttatagccctagctgtcctggaactcactttgtagaccaggctggcctcgaactcagaaatctgcctgcctctgcctcccgagtgctgggattaaaggtgtgcgcagaaggagggtcttaagatgtttgtgtctgccacattttaggtctgggtgggcttggggctttaacagtcaagggtccttctaatttactgtaccatagaggtctgttcaaattctcaaggtggcctcagtccatggagatttggaaaccttgagtcacatttttgttttgttttgtttttcacaggcaggaaaaaaaaaaatctgagtaaagtgtaccatctactttaaaggacacccaatttcactctcaacacaccctattggctgtaactgttcttcaggaccagatctaactggaagagaccttgaaaagaagataggaggaaacacacaaacacctgaaccgccagaaactattactggggaagagaaaaaggaggttactagagaaaaatatgcaacctttgttcctggaaccaggcatctaactttctatcctagaaagatagataacctattctgtccctccagggggtgggtgtggcagtcagaaagctagaactcagtaattttaggatgaagatctcataaaaccctgctgtgggccagtgggtgatcaaatgatatgtttacatttttattttcagatttacccttaaatgtccatttaaaaataggtgtgaaggagaagcaatctcattttccagttatgtaatagctaacgtgttcctatttcatagaattgtcagttactaacagataagtccagctgggactttatctgaacctgggtaggaagtacagacttcagtcatattcaaatgatatctcattgtctggatcttgaatattcaggagataaagattcttggttcttcctgtatcttcttagaaatagaattccacctccccaggattgtccaaaattctaccttagattttcctgtaatgttattttgtctcctaagctttcttaaatatatcctgtgtaaatgtgacttcatctgggctgggggctagagaaggggtttagaggttaggagtagtggctgctcttccagagggcccaggttcaagtcccagcactcaccaggtgtattgtaaccatctgtaattccagttccgggggtgggggtggggatccgatgctttcttctggcctctgtctgcaccaggcatgcaggtagtgcatgcagcagataaaacttccatacacataaaaataaagaaaatctttttaaaaactgtcttcatcatgttccttctcaaatttgcttctggctgacccctccccagctgaataaaaaggtaccaggtgacctaagccagggtgacccctccctcaggtctcacacccagccagtgagtgcaatgcctgcgacttgctctctgaaggttctcactgccagaggtatttcctctttgctggcttgatatggtagcctccctcaccctcagctctgtttcagcagtccctcctccaccaatctgacatctatcaatttcccccatcaatctgtctatagaataagaccagtattcatttatggttttgttgttttgttttgttttgttttgtttttatcgaggcagggtttctctgtgtagccctgtctgtcctggaactcactctgtaaaccaggctggccttgaactcagaaatctgcctgcctctgcctcccaagtgctggtattaaaggcttgcgccaccactgcccggctcatttatgttttattcacccattatctatctatctatctatctatctatctatctatctatctatctatctatctacatatctattatctatctacctatcattatctctatcaagacagtctcctgtaacccaggctggcctcaaacttgctgtgaggtagaggtttgcctcaaacccatgatggtccttagtctacagagggctgttttgcagctgtgtccagcctagaaaccttctaagatctggggtctttgttcatttccagatggactcttgtgatctccagccattccatgcttcttcagctgaacccccttgagattcctccttgtgtggattgccattccttttaggagctcagagagcttgttcctttccacagggaagccctgcccaccatccttttggtattcagcggctgggtatgggtttatgagagtagcttcagcaggcctctactgttctcttaatcctgggaaggcagagttgaaaccttcccacttggcacagatctggaggtatcttctggcttagtaagactccattgtaaagtgtaggagttataggatatacatttgagtgtatttattttggattttttccccttcaatccaaagagccgttcgactggtttcttcgtttcacaggcgttgtctgcccaacgctcaaacaaacaaacaaacaaacaaacaacaggacacctcacaagaccctgctactctcctggggcttgttgaggacaaggctctctcttcagaggcggctgacctacgcagagccagccctcctccgaagccacagctgtgagctgggaagctggatggcggaggcccttaataaagagcagacctcccaatcgccttccctcccccacctctcacatggcgtttcaaattaaaagttaactaaaaaaacgaaggtcgaaggagatggagagtgtagtagggccccgggatcactagaaggaggaggaggctggtctctctgcagaagaagagggaatcggacgaccagatcccccgcggtccggtccagccacagctattcagagagcagaggaggatagggccctcctcgtctaggacgtaccacggagacaagctcttcaattagggccatcaccggctgttgtattaggaaccctagagagaatgcccggggctgtggactcaggcaactgctttccactaccccctggaaatcccggggggccctgtaagctagccaccgcccgctgaggaggtaggcgacaagtcgtggagagagggtaactggttatactagtcctctggattctgcagagcgcctttttctcttcttgcgagagtgggctacccctcagctctggctgcttcagagttggggtggagccctgctccatctctccgcagggactccaacatctggttgccgcatctccagcctgctccaggctcccccagccctgggaggaacctcctcccgacgcaatcaggagttaaaggggcagtcaaaggctttttcttttgctctagaccaaatgccccgttattttcaaacaagaaaccagacacacacacccgccccttgcatctcgacttgcccgcggcgtctttatttgaaagaaattaacaagtttgtttgaatgtgaattttcacaggtaacggctttggtggttgtaactggtcttcaacagaagggcttgaattctccaaggatagtagaactagtgggcagtgccagcgagcaatgagaaaggctaggcgttggtgccggacgttctgattctgggatgcaaggcagaatttattttctgtcagtgaccattttgatgtgattatcaaaagttcacggggaccttctcttgaaggttaaatcatctatagcagttagcgtctcttccttctcctgtactctattcctggtcgcccccaaggcatggggcataaggccagggtatgattccccaaagttcccaacctcgggcgagttgggcctcctccggtctcaactgctgggaaaacctcgttcttaactccagggaaaaagatccaaagggttgacaaccacaatctgaatgcaggctgggttcttgacacactaacccaagcagaaagcgattccgttaggctcaccaagtgacctggtccccccccccccccccccccgacatcagggacagaagttcagaaggggagaaaagaccttggctaggcactggcacttgccttcttcggccccgagaccacccaggacccggggtgttgagggggcaatctggaaggattttagaacagggcaagaactgggctggccccctccccctgacaccctgggttgagtgacgggcacagaccggacctttccttcagcccccagagagtggagggcggaaaatgcgattcaaacccgcctatgagcagtgggagcagtgggcgggggcaggacctggtttcagaaaccaaccgcttgagctcccaagcctcctgccctgaggtggctccagaccactgcgtttattttgcttttgcaggcaaggcagatgctttgctgggtcccgactcagcgagatctttgcccaaccatttgcttgcctgctccaccccctactggggcactatcccgggagtcagctctccaggcctttaaaccttagggaatgtcacacatggaaacctttagcaaatgtttgttaatgatcataacaaaggcatcatttaaattaggcaggtaattactaccagaagagcaactgggtgctcgatactcatccttttctcccctttaaactcccgaggaattactgtctcaggatacccgagccggcccgcttttcggactcctttaaaacggctctgaaatgaactgtgaagttaccatttgtgggaggagaacgcaggggccctgcttgaggcaggtagtgggattagagctggtagggtgttccttgcaaagcaggctctcctctgcagacgctcagccccaaactcaccccctccttgggtacctgctacaaaaacctaaatcttgacttgcttttaacaacagatgaaagcccccccaacccctcgctccgtgtgtgtgtgtgtgtgtgtgtgtgtgtgtgtgcaagcctgttcgcagaccttaccatcctgttcattatctacaaacattacggtatcctgctagcattccgaacaaggggctgttcatacatttcgccttcaacggtttcctgaaggaacatgtggaagtaatagtgagcagggcagtcacccgagctgaagatacaccagaggcgggcgtgcagaagggcggaggagaattggggctctcagcccagctccaggcatcctcttcccgagcctgatatccccacggtcggtcctgtcccatttagggacagcactcggcatttcggggaaacctctgtgatttacgccagagcctcaggtccactatagtggtgaaataaccgatggttattcgacgttttgttatcaacctggtcaccttgtccattttaattttgatgtgtgagatggnnnnnnnnnnnnnnnnnnnnaccccccccccccacacacacacaccaaaagcattcaaaaatagagcgcaagtcgaaggccctcccttcccccacccgctccgggaagtcccgcttcgcccaggtttggttcctggagtgtcagcgccccctttccctcgccagcaggatcgccgtgtcccaactgtctctcgctgggtgtcttgggttccctggtttgtggctcaaacgtcctgaaagctttcctagggtacgtcgcgtgcgacccactcggaagggtggaatttaggaggataaaaatccttctgccatcaagatgcagagggcaggcatttggtagtcacgcctagcctgagcgttttcatatgaagatagaagaagcgaggaccagataacccccgaaaacaaaggcaggaccagataagtggctccgaagggataaaggtcgttctttccttcttccggagaacatcccaaaggtacgccgagcaaccgttatttgcacaccgcctcacaatccagcctttcaaaaacccatcatcttcctattagactccacagtttcctaatcccattaaaggattagcaactacacggcactttcccttaagacccccagttcaaaacgacgcagccgcgttagaatttctccccagggccatatttctagcgaggcccagactgtctatagaaaggataatttgaattctagatttatattcgttttagaaatgagcagcaattttacgtgtattttcttttcgaagagaatacaaaacaatagcacccccacccccaaattgggaagtcaactcattttggaaatgatggctgtttgtagtttcctgaaacctctttcccggcagaacgtcaacacctcccccttcggccccccaccccaccccatctggtttgctcccccctcctcgttgttgttgaagtctgggggttgggactggcccccctgattgcataagagcaaaaagcaaagaagaggtcttgagcctgagagagtcagagagcaaggagtcctagggaaacttttattttgaagagaccaagggggggggggacttcatttcctgacagctatttactttaagcaaatgattagtttttggaggacggactataacattgaatcaattacaaaatgcgggttttgagcccattactgttggagcttgagggagagaaacaaacggaggagctgcggggaaggactggaagcttggggcttacttttcactccgggtatcggattttctttgcaaattgacatagaaggagaaggtaagggagaggaaaaagtgacttttgtttctcaagaaggtccctgatcataacttggggctgcaagaagctaagtaacttcaaattttgggcaacgaggaaaacaaaaacaaaacagctgagttcagtggtgtgtccagaaagtaacttattctgaataaacttcactggaatggggggtgtgggggggtaaccattagagagtcaaagataaaaaaaaaaaaagaaaaagaaaaagaaaatgaaaaaaaatccagacctatttttaaaagcaatgtttttttttttttccctacacaatcctatagccttccaaagaaattgttaggcttacatttttgaggttttcctccagggtgggggtggcgttcgtgcttactgggacgaacaccaagtaacattgggggggtggaagccgcggcgcttggcctcttggcagtgggtcacggaagaggacaggtttttaatgagtattttcattcgtcgcccgcggtttggcgggactacgctgtagcgggtggtgcggcgcgaagcttggggagggggcgcaccaggagaagtgtgtgtgtggaggggaaaggggcgccgagtggggcgcgggaaagcgctaagaaaaaagggaggtgtgaagggctcggctggaggaggtcggacctcggatgccggccgggcacactcggcgccagtcgagccctcgtaattactggacggcgctgctgttggaaacatctggggccagacttgagcgcggcggtggcggctgcagcaccgtgagaggggcgcgcgggcgaggggcgcagctccaagggttccggagagattggagcgaattacttgggtgctagaagcctcgggcggaatccgcagtgcgctgggatcgtgcgcctctcactccagcgacggaggcagcggcggcagcggcggcgcggacgagcgatctggaataatgacaaacacatttggcctcgagtgaagaagtcgtcctggcctcgcattccagcaactgggatttgaggaatttcaaactgcactccgaggggccctcattgtgctccgtagtccccacccccactcggctcacttgcgtctccagtggagtcttttctgcacggccgggggttgggggggcctggctcttgcttagtcctggccgcaggcagcaaagaggcaagatccctggctaggagctgacctcttgtgaagaagtcaggacatctctgaaaggacagacgtgggtgcaggtaagcagaaatgtaagaggccaaccaccctcgcctcctgcctacggaactctgggtgcttctctgccctgggatgatggatgcgaggcactggtcgcctgaacgcaacctttccagtgccccccccccccaactttcctcccaacgctcagtatcctgcaaaactcaggggcggtctccgcgcagccttccctccttcaccgttattcccttggaaatcagtttatacatgtgagattaacttccctcgagcagggccgggaaagcaggaagcgatctcttggctttgaagcttctgaggtcggcgattctttctgtttggaaggcgtgtggggcagtctgcagagtaaggcagtatgactcggccctggtctgcagcaggaccaagccagagcctcgcagccaggtgtgcaggagttgccagtgacttggcgaccagccttggcgagaaaggaagtgttggcctgtttgtctgctgtggggagtccttgcagaacccgcgcttagaaactcccaggtctgctaagacctctagaagacccggagggtgtgcatgggggaacccaagctggggagggggcgtgggtggcacttttaaaagtctgggctgcccagcgtcggacagagctgcccagaaaagccccaggctgggcggtgtgggaaacggctttttggcttcgtggcggaattgctcaatgttttggactgaattgcttctcctgaatggtttcggatcagtcttaggcagccttgaggagccggaggaggcctctagtgtaaacccacactgtggtctgcagctgtacagccccagatttaacacccaaagtctcagaagaggctcggggctcagggcgctcctcgggcgcacctcttctgccttcgcactggagtttacataacctctcttaggctcggattttcccctgaccaaggctttccatctcatccttcctctcgtcctctttctttgcaaattcctcttgatgaggactccttcgatttcccaacaggagtgtgtgtgtgtgtgtgtgtgtgtgtgtgtgtgtgtgtgtgtgtgtgacacaccaattaatttgtcgccgtggtcagttcctgcttaggaacccttgcaaaagtcctgttttgggttgtctctagtacagctgggtttctaaagctcgcgggagagaaagaaagaaagagaacacagtccaactccactgtttattgccccggatcccttcttttgctggagtctgcagacccgcagggttcagactcagaacctggcctcccaattctgggcccaggggcttctactttcttcctgggcgcgggctggggagagatgcagggggaggggcttcaggctgcaaacgcgtcaggcgccgaagctggcgggcgggatttctgcctcctggggacaggacctaggctgcgcgggacctggggacgtggtgaccatccttctgcctggtgacctcgaggggtgggatccccctcgggccttcagtgagtagcatccaggttaaaggttgctgactggaaagctggataggtgactcaaaggtgagaggctcagcgacagtctggccgctgatggttgggttggccggaggcatcagcattgaggaggagaaggagaagggggagaagannnnnnnnnnnnnnnnnnnnacacacacggagagagtgagggagaggcagagagacggagacacacagagacaggcagagagacaggcagacacagagagacacccagagagaaggggtggtcgggatcccgagcgtgctagcgcggaacctcagagagaatcggccccagtgcgcgcagcgctgtaggggacccggagcctgagctttgagcgacgccggagccagcgggtaagatcagcggggttgccgcgccctctagtggctcccgcagcgcgacccttgtcccagtagccctgggcggtcgagcggtccccagccgggagcccagtgcgcctggaatttgggctcacctgggtcgctcttgagttttcctgcgggcactgcgttggcgcagaggcgttgggtggacaagagtgggctgagggtccgggtttgagctggagaattggggcgtcttaatttagcagaaggtgggtggaggcggtggaattccggatccagggagatcttgggggacagtagccggcgtgtgcgctccaggccggctcaagcttccttggcctgttgctgtcttagaccccgcgttaccgagcaatggaaatagtcctttctaaccaactgggctgcagggaccccgcggggggcgggtttacgagcagcgagaacagagtggcagggaaaggcgtcgtggtctctcttggcagggtctaggtagccttcatgcttggagaggtggaaagtcaaagggtgttgtttcccctaaacccaagtgaccagttctgcaacatctttgagacctggtccacagcgctatcttcctggctctcaaggcacggctgtgtcttggtccctctttgggcagtggtgatgataattatgctgatggtgacgatggcggtatgtttgttcctcagtgaagtctctggaggtccccaaagaaatttagcattttagataggagttttgtcatttcttcttccacgcctaggagctcaactacaagtcatcacaagacctaaaagtaaagattaacctacgatttttttttaaagttgggacattttaaaatcagaactggtttcaatggcgcctgcagctcagagacaacaggacactggttcttgaaccaacactgccatctgctgtctactctgaggaactgcatatgcctctgagagggcttggcaaattccaagcaaatattggnnnnnnnnnnnnnnnnnnnnnnnnnnnnnnnnnnnnnnnnnnnnnnnnnnnnnnnnnnnnnnnnnnnnnnnnnnnnnnnnnnnnnnnnnnnnnnnnnnnnnnnnnnnnnnnnnnnnnnnnnnnnnnnnnnnnnnnnnnnnnnnnnnnnnnnnnnnnnnnnnnnnnnnnnnnnnnnnnnnnnnnnnnnnnnnnnnnnnnnnnnnnnnnnnnnnnnnnnnnnnnnnnnnnnnnnnnnnnnnnnnnnnnnnnnnnnnnnnnnnnnnnnnnnnnnnnnnnnnnnnnnnnnnnnnnnnnnnnnnnnnnnnnnnnnnnnnnnnnnnnnnnnnnnnnnnnnnnnnnnnnnnnnnnnnnnnnnnnnnnnnnnnnnnnnnnnnnnnnnnnnnnnnnnnnnnnnnnnnnnnnnnnnnnnnnnnnnnnnnnnnnnnnnnnnnnnnnnnnnnnnnnnnnnnnnnnnnnnnnnnnnnnnnnnnnnnnnnnnnnnnnnnnnnnnnnnnnnnnnnnnnnnnnnnnnnnnnnnnnnnnnnnnnnnnnnnnnnnnnnnnnnnnnnnnnnnnnnnnnnnnnnnnnnnnnnnnnnnnnnnnnnnnnnnnnnnnnnnnnnnnnnnnnnnnnnnnnnnnnnnnnnnnnnnnnnnnnnnnnnnnnnnnnnnnnnnnnnnnnnnnnnnnnnnnnnnnnnnnnnnnnnnnnnnnnnnnnnnnnnnnnnnnnnnnnnnnnnnnnnnnnnnnnnnnnnnnnnnnnnnnnnnnnnnnnnnnnnnnnnnnnnnnnnnnnnnnnnnnnnnnnnnnnnnnnnnnnnnnnnnnnnnnnnnnnnnnnnnnnnnnnnnnnnnnnnnnnnnnnnnnnnnnnnnnnnnnnnnnnnnnnnnnnnnnnnnnnnnnnnnnnnnnnnnnnnnnnnnnnnnnnnnnnnnnnnnnnnnnnnnnnnnnnnnnnnnnnnnnnnnnnnnnnnnnnnnnnnnnnnnnnnnnnnnnnnnnnnnnnnnnnnnnnnnnnnnnnnnnnnnnnnnnnnnnnnnnnnnnnnnnnnnnnnnnnnnnnnnnnnnnnnnnnnnnnnnnnnnnnnnnnnnnnnnnnnnnnnnnnnnnnnnnnnnnnnnnnnnnnnnnnnnnnnnnnnnntccccctcccccctctccctccttcctccttcccctctccctctcaaattttaaatttttatttcaagtgtatgtgggggggttcccccatatttatatatatgagtcttgtgcatgcctggtgtcttctaagatcaaaagagagtgtcaggttcctgagtctgagctgctgtgccggtatagagacttgaacccagagaccattcggtgaccttaaccactgtgctatcccttcatccccctttttgctcttgaggagcacaaagatgattttattaatttttctttcttgcgagtctgcaacaatctccagaggaacagattttatttttcagacatttgtgtagtttccaacgtgtgtgtgtgtgtgtgtgtgtgtgtgtgtgtgtgtgtgtgtgtggtcaagagatcaaattcaatccttccaaatgctcagtaagcccagtgtggctgagctacatcgagccctaattgctactctttcacacgtacataatgaacggggtttatgtgagcaggcctgaaaggaagggagcaggcttttttccttctgtaaacacagcgtgtgggcttggtgacttcaagacacctgatgacttttcttttcatttagtgacagtcgaaaggatgtgttattttattctttcagagttacacatctggtgcaaagagaccagaaaggtctatgaacccaggctgccccctaaaatgcatgtgtgtaaaagtgtcccagcccctgtctcttattgaacatttaatcttgtactttggcagatcaaaacaccgcagaccctggtggggtacaggtcctgggaaatacaatttgggctagaaaacgcagaagtggccaccattgcagacccatatttaagctgcctgggctgaagttctgagagcgaataaagagagaggagaaacaaaacaagaacctagatgtgctattttcatagttagaattaacttaggagaactgaaattaaccaaacctcagaaatctgaatcttgaaggacctcggtggctttggtggctgagagcctcctgtggtctttaattgggacagggtggggtggatttcattgtccagtggttgagcagcgaaatccatgttttttgctcttactgtcagggaagctgggagtaagcctcaggggagtggtagctcttctgggagcaagcttgcatcctgtttactttcaaatttgcctgtggtctctggtaggaggctcaccttaggagttttcacttctgcagtggaatgactagctctgatggtgtaccgctctgcagcaggagagcttgagttcaaggccaacctgggctacatcgtgtatatggaagaactagaaagagggggaaggaagaagggagggatgggaagggggtggttggagacagtggccgcagtcagattgacttctgtgttttaggactgtaggtgttagttaacgttgcagaatggtcacagcgataccagctcgatagagacttttcatcctctttcccactaggcagaaggaagagatgtggagtatccagggctccacttaattagtcaggaggagttcctagactggttaagagcactgactgcagccgagcttggtgacacacatctttaatcccagcacttgggaggcagaggcaggcagatttctgagtttgaggccagcctggtctacaaagtgagttccaggacagccagggctatacagagaaaccctgtctcgaaaaacaaaaaaaaaccaacaaaacaaaacaaaacaaaacaaaacaaaataaaacaaaacagagtactgactgctcttccagaagtctggcatcttaggattctgcagggcaagtctaagtgaacatcaggcactttgaaactgtgtatgctagtcccttaggactcagggaggcgagccggcaagccagtgatggttggtttcaagttagagacaggacctaagtttaaagggatagacagggtttcagagctggaatcagaatctaatctgagaaggaatgagagcaacaggttggagatgtcccatagcaccggagagtgagtggggcagcaatctcacaatctggcttgtctctcccactgtgacatggtttttgaaatgtgaacatggcagggcaggagactgatgtccaacatggaatcagtgtgggagcaagaaacaatatcttgtctatttatttatttgtgataaagtctctggggctggagagatggctcagcgattaagagcactgactgctcttccagaggtcctgagttcaattcccagcaaccacatggtggctcacaaccatctgtaatgggatctggtgccctcttctggtgtgtctgaagagagacagtatactcacacacacaaaataaataaatctttttttaaaaagtctcttagagcccccgccaggctagccttttgtctctacttcactatgcctgactaataagtgatttaatttaagaatacattcatgtatttattacctgtatgtgtgcatgtatgtatatgtgtggaggccagaggaccacatatgggagttagttttctcttcccaccatttgggtcttggggctctaactcaggtcatcgggcttgggagcaagcacctctacccaccagactgtctcaccagccccattaattttttattttaagtgaaatctgtccctcctccttgcaaagtgtttagtccccatcacaccaacttacagtgctacaagcctcagattttgtaatggcagctccctctgtctgtacgtctgacctgtggatattcatggctctgtctgtgtgtctgaggtgtggatgttccgagctgtgagcaactaactaaagcatggtccttgcaggttgggaaagcaccagccaaaccaagactcccttccggagctcttccatagagcaagcactgggagtctcttcctctccccttgggctctctttctcactgtgggacaggcatgctactgttattcatggccagattgtctgggtctccgatgagtaatggcatgcacctagccaggcaactgctgctatcagagtctggagttgggaatcttaagcaaacacatgtggacattcgcatcgttatcactctctcggaggctctgttttcgttgcccactttgagcgccagtaaatcatcacccctggcagtaagtgtaccatatctggacacacagaaggaaatttgctggagcctggctggggcaggccgttcttcagagcctgctcagtccctgtgctgagttctttctctccagcttagtggggcttgaaagatccatagctgctgaccctggctggggaggtaccagggtggggatgtgataaatccccagccagcacgctggctctgggagccgctttgtagctggccaagtggattatcggtgggaggttgatgttggtgtgtacaaacacacaggccctcactgctaattgtggtaaatcaggcaaccagcctggctctggggcctcccgtggctgtcaccacagccgtttggaagccctacatcctccagcacctgccaacatcctcagaggccattaagccagacagcatctttctaagtgcatttggtccacaaccctgcaattaggttttttaattgtggtgttcagagaaggagaggggtcaggggtaggttgtattgggaaagagtgggcacagaaaggctaacctttcccagatccctagggattgctaggctgcttgtcggtgagctccaggctcagacagagaccttgctttaaaaaaaatagtgtagaatgatgaggaaaacacctgatgtcaattacgccttccacatacacctgcgcacacatgcatacatgcatgtacacacagacagacagacagacagacagacagacacacacacacacacacacacacacacactcctggatctgcccatggctaagtgtttttggatcatttgctaaacttctgtaccccacagtaagaaactgtaaaggtggaggctcttcctgtatagagatttctaaaaaggaacctttctattccccagaatttggtctgcacagatcctgacaatgatgttttctgtgcctcccaatggatgaaatctaagtgtacatccaccatgctgggcctctcctcctttctctcaattgtccctttgtttgtgttcctgtcctgggctttccaagcttctagtagcctggccatatgtccaggtcccacaagaacacaggctggaagccaatgctcttgcaggcttccgtctcacagaggctgcctcaaagctagggctacctcgaaaccacacgctatggtcaaattgttccagccttttctgaaaggaagacgattcacactgccgatgagctgtgatgtgaagcaagggacagcccacgagaagcagagacttctccagcttagatggagaaccagtagtaacatttattcccccaatcccctttggagacagtaattgaggatcctggcttgactctcaggctccgccatgctctttgatgcttccctcttatctatctgactgtattagttgtcagccttaagctgggacatgcttccactgacggtaccagtaagaactcccatggcaggagaacctggcccaccagtggctttctgtttggctaatgctgtttatgtttggcttttgtcatttgcaggtctcaggagctatggggacctcccaccaggtctttctggtcctcagctgtctcctcacaggtatgtatccacacatgcgtccttgttctcctaactcacagttccagggagccaacgtccatgttctgtgggcctctcacctgcacctgggtccaaaggggggcgagatgaaaccaacaggaacttttgatgcctttcactaaatggcaccaattccatttcaaaacaagagctttctgtcagtggtccgaagggaggaataatctggatattgacatgtctgcacttgcccacttcttcctctctctgggatgggcttacagcaaggaaggagaagatggttttgagcatgttcaaatagagtaaagactcaggcatccttcatcaggtttagggactcaaacctgtaatcccagccacttgggaggctgtagcaggaagatcataaactcgcggtgtgccagggctacatagtgagaccctgtctttaaaaacaaaaagtaaaaagagggctggggagatgctcagtggtagagcgctggcctggcacttggtagatcctttccacgtgtttgtctgttgcagacattactccaaagttaggcaccgatggaaactagagaccattaattaataattaagtcagaacgtgtctcctcttcagacaagggaagctcggctgaaacgtgaagcttagggattagtttcaagcccccactccccgcctgtgttttatttattatttgtgaatttaaacccatgccttcctgctttggcttttggaaatcattaaggagagatggtgtgccagagggtggcagtgaggaaagacgtggggctcctgagtgagcccagatctgctgtgtgctttgttcgggcctctctccctgcctcttctcacatctcctgcccattttttttttaaaccaagggaaacttctgcagggcatatgcatgataaagaacccatatgtgcttgagcccagaccgcactgggatattttatggtcacacataagagtgtgaaatatggaattggaatcagacatcctttatccgtttgagtgtttggaggggtgagtatggggcgtttggtggggctgttgaggccgttggaacacttgctgccctcagcagatgcagtggctgttataatggggggcctttcatgggcatccagaggaacagagtttcacgtagaaatggccgttgttcatataagccgccactgtggctactctcagcgctctggagaagctgtcctttctggctcgccctattcaatggctgtccctttctacagggccgggcctcatctcctgccagctcttattaccctctatcctcccaaacgagaatgagaagattgtgcagctgaattcgtccttttctctgagatgcgttggggagagtgaagtgagctggcagcaccccatgtctgaagaagacgaccccaacgtggaaatcagaagtgaggagaacaacagtggcctctttgtcacagtgctggaagtggttaacgcctccgcagcccacaccggatggtacacttgctactacaaccacactcagacggatgagagtgagatcgaaggcaggcacatttacatctatgtaccaggtgagttgcagggccctcctagaccacgctgcgtcctgccctgcctgcctctgagtcaccgagttaaggggcataaaacacgagggattcataaatgtttattgcagagaaatttgcaaggtagaaaagtctttcccttctttcatctctgtctgtctgtctctgtctgtctctgactgtctctgtctgtctctgactgtctctaactgtctgtctctgttgctgtctgtctgtctgtctgtctgtctgtctgtctgtctgtctctcactggaactctcactgaggctggatctaggtggttagcctgccaacccaagctatcctcctgcttccaccttccacagagctaaggatatagatttttttctttttatgtgagtctttgtgattagaaccctggtactcatgcttttaaaacaagtgctcttactcactgggccactccttagctctctgtctgcctgtcagtctttggttcttgagactctcactgtcttagaacttgccattgtagtccaggctggcttctaacttatagcaatcctatggcttcagccttctgggtgctaggattaagggcatggggatgcttaacttgctggttttgtgtttgagataaggtctccttctgtagaccagactggctctgaatttaccattctctgacctcacctcccaagtcacagaattgtgtgcatgtggtacccgactccggtgttttgttttgtttgttgttgttgcttttgagatgagagcttggtatgttgcccaggctaccctcaaactgctacacttaactagtcctgctgtctcagcctcttaaatagcagagactacccacattatgaccagcaaaatacacaaattaaatacagatcatttgcacgttcaaaatcaagaaaaactcatgggaggcttggagatatggttcaggttttgggagcattcgcagctcttgcagaggacccaggtttggttcctaggactcacagagatacatccctctgttagacagttacaggagattagcgccctcttctgtcctccacctgaactgcatacatgtaatgtacctacatacatattcagccagaacacacacacacacacacacacacacacacacacacaccaaaaaccaaataaacaaacatggaaattcccctaaatgttaacgaccaaggcaaaaagaattccttccactcttcaagagttaatgcacctttgtaggaaagctggaatggtggtatttaaaatgcatgttgttttaaaagagaaagacttgcagcttgggatctaactcagtgacagagcgctttcccagcaagaggaaggctgtcgattctacccagagaagtggttattgtcaacatgtcagggctttattaattttgaaaagtctttactgtcgaatgtcttttattcagatggtacaaaacaaaaaaagaaatcaaatgtagtcagtcagtgtggttcagtcagtgtgagcaggcacttacatgtgtatcaggtgccatgtcttgtgtgggaggcaggattaacaggcggcaggccttgctttggatactcacagttcactagggtagattccaaatagccactcagtttcagctttcatacaaatgtgcatttactcttgacgagtaggaaggaattctctttgcctttgtcattaacatttagaggagtttccgtggtaatgatatgaccttgtgtctgctgagaggcagatgccaagatgtaggttacatgccttggttttataaggggcaagacctaggaaaggggtgggagggtccccgcatgctcctgctggactccattagatgaatcggtactacactgccttcttgcccatgggcctcaggtgccctcagtcagtgacaggaagcattgctggtgagtgtgattttaggttcagagggctgcagagctaggctctagaccattaagccctctgtggttggagggatgcgctttctctggaatccaggcttagctgaaagctttcgatgcatttggtctgccacccacctcgcctccgctctgagcttttgccgagctggagctgttggtatctgtatgtagcgttggtgagcagctgtacaaagaaggaccctggtgttacctacacaccatacaggtagcattcggtagtcgagaagattagtcttggagagggaagcccaactgaagcatgggaacatgagtctatctgtctgaacctgacccggatgcatacctgtctaaactctgtgtggacagggttcaagtgttcggaactctgaacacaaattagaacggtggggctttatgttgctggggaatggaaaaagctttggagtacaggtgactgccgttcacactctgcctttactgcatgtacacgggtgctgggggtttgaactctggtcctcacacttgcctggcaagcattttcctcctctccagctccgaagtgtctcttttcttacaatagaacagtttgttgtgaaaagggcaggtgtttagaatgtcactttaatgctacacagtaacaatggtggtgaagctaacgatgataatgatactaacagaacactttttcccccctgtatatgtgtataaaaatgaaatgaaactctaatagattcttctctctctctttaaaatcacagacccagacatggcctttgtgcctctcgggatgaccgattccttagtcatcgtggaagaggatgactctgccatcataccttgccgcaccacagatccggagactcaagtaaccttgcacaataacgggaggctggtgcctgcctcctatgacagcaggcagggcttcaacggaaccttcagcgtggggccttacatctgtgaggccaccgtcaaagggaggacgttcaagaccagcgagtttaatgtttatgccttgaaaggtactttcacctctctaagtgagagcaacaggcaaacaagttttttttttaatttgggtgttgcctcttccttctctatacaacgtggctgacctctgtaactataataatacaggcttaaaaaaatactacaggctgaacttgcttctacgtgtaagacagcatgttccctgaaaaatacctcaaggaattctttcttgcataagcctcttactatttggttcctattcttgaatatgcagccctaagaagcaaacacaccccagggggttggaggtctagattaatttcagtaacttaagaatcaagtgatttcagttttgaaggaagactatagttaaagaggctaaaacttcttccctttgatgtgaggggttcgttagcctgacttgcaaagtctcggggaggggggtcctggtggccgaattttaggtggggactttacacggacatggagcagaagcaagaaattgtcacttgcctcttgttacaaacttattttgttctgagctctgggaggtgctacgaataactgggggagggctggagagatggctcagtgtttaagagcactgactgctcttccaaaggtcctgaattcaattcccagaaaccacatggtggctcacaaccatctgtaatgggatttgatgccctctcctggtgtgtctgaagacagcgacagtaacagtgtacttacatacataaaatagataaatcttaaaaaaaattaaaaagaataactgagaggcacagaaaagaagttacagccaggggcacggagactttcagtggcttgaaagagtgcagccacagtcatacagcccaggcatgtggtgttcaggttaaaagagactgagctttaccatcgttgttattttgtatttctgttatatcctaagttgtgtaagactcaaagtccaggctccgtagacggtccggcttttgcctccattacactggtttggacatgattttttcatcatttttaacggccctgattcagctacaggttttactttgagatcccgactgtactgtattttctttgtcatctcatcacagcaacgtcagaactgaatctggagatggacgcacgccagactgtgtataaggcaggagaaacgatcgtggtgacctgtgccgtctttaacaacgaggtcgttgacctgcagtggacttaccctggagaagtggtgggtaccccgggataaggagctcacggaacccccacaacaggacttgtaactctacacaccagaggtgtttctcttggatgggcacatccctgagcttctctgggcctcagcttcccatctgggcaatgggcacatttgactccaggacttttaatttttctcaatcaggcagagtttggcatgaccacaagggacatgctccccttgagaaggcagagacaagcaggaaggttctgtggctagaacacaagcattaaagcattagaaaggcaagaaatgcctggattgtaaatattagccgattgcacagtcatgtatcctcactgtcttgggtcacacgccttggggttgtgaggtgtctgatagtgttgctaagtgtgtgtgttattgtggcctgtagtcacccagctgcacaacagcacaccagacttattccttccatctgactggaactttatataaagccttattcactctgatagctgtagagagtatataggagctgtgtatgaagaatatgtaaatcgaatgcagaaatggtgtttaatactgtgcatgggggcctcatagggaacaaaacacatgtatacaattatgtatggggaacaaatccatgtgtcaattatatatatatatatatgtatatatatatcatgtatgtatttttctccttactattacaaaataacatatagcacacattacatatatttgtgtgtgtgtgtgtgtgtgtgtgtgtgtgtgcactttacttgcatgtgtgcctgaatgacagaacagggtatcagatcccattacagatggttgtgagccactatgtggttgatggggaattgaactcaggacctctggaagagcagccagtgctcttacctactgagactctgtactctggtcgctttgtcattggagaactttgcttctgcttgccatttctctcccacacttttgctggcttttttttttttttgctgcctggccgttcattcacacttttatttgataatggtggatgtgtgggacagcacctttgtcacaacatgctatggaggtcagaagagtactcttctggactcagctctctgcttccacctttaaatgggttccaggggttgaactcaggtctctaagtttgcatggcaggtgcccttgcccactgagccagcttgcagaagcaagtctggtgctctttcattaggcatgatcgttaggtgttgtcaattgactgcatgcatggtgggacactcacagtctagtgtattatattccttgcactatagtgtgacttggtggttttcttcatgctccattacttttaatccctaaaacacaatacttcatttatgaagtgtttttaatttttaatttttaagccgaaacatatgacatttgacccacaattacataaaatgctttaacactttttttccctcccataaaagtgctgaaaacttctctttgaaaatttgtaaactatggagaaacacagggaaaccttcttctcagagcagcacacatctcagattccagacagacaggcagaccctttagaattcttcattaaaagattgttttgcaatactgatggctgactcagagccttgcaggtgctgagcacgggatccatggctaagctactgccttagcccagcgctttaatttctgcttgccttttggtttatcggggctcactctgtagcccaggctggcctagaactcgctacatagctcaagctggcttcatccccaggggagtagtccctcatcagcctcccgtgtgctgggatttgagctgtgagccaccacacttaacgctagtatcgttttaaagcatggctttttaaaaggatctagatttagcgttattttcacttcttgttactgcatgtgaagcaaatataataatggattcattatggcatttacacacacacacacaccacacacacacacacacacacacacacacacacttgattatgttcatctgccactaactctgctctcttgcccccgcccccacccgtgttggcagagtcccttcttttaggctagtccccttctttccttcatgcctttttacgatttgtttgtggtccaattagcttaattaaagtgacttccaggaggatgggcaaagggttggcgggagcatgggtcacttaccagggtctacattactggagagaatgtctcccctagcaactgctggctactgacaaggcctccgagaggacaggggcctcgctggcttctcccccttctgccttcttatttatatttctattctttaggaggttttatgctttagcgcatctttaggctcacagcaaatgtacaaagcacaccaatttcctacgtgatcccggctcccacctatgcttagcctgccaagtgccaggtcttcctcggagcgcaccgtgcttaggacccgatgagcctcctacactcacaaaccctacaccagggctcactctggaaggacctttttttcacacgaccgttttcttgtgtgccactgcagagaaacaaaggtatcaccatgctggaggagatcaaactcccatccatcaaactggtgtacactttgaccgtccccaaggccacggtgaaggacagtggagagtatgaatgtgctgcccgtcaggccactaaagaggtcaaggaaatgaagagagtcaccatttctgtccacggtacccactgttctgttaaatggctgccgttcgagggacttggttgggaggcacaggctgtggttattatttactgggaactcttgctttcacagagaaaggcttcgtcgagattgagcccacctttggccagctggaagctgtcaacttgcacgaagtcagagagttcgtggtggaggtgcaggcctacccgacgcccaggatatcgtggctgaaggacaacttgactctgatagagaatctcaccgagatcaccactgatgtacagaagagtcaggaaacaaggtaaagggggccattcccaagtcactcccgtaacaccagccttctgagcgctgagggagtggcagtaccagagggaccagcacctgagctgagacgtgcttacggtcacattttaatcacagcttcctcacactttaagataacattgcagcctgacgaggtaatacatccatgagtgtttaacgtaaaatgagaagaaaggactaaaaggttctgtcctccagtggaggacagcatactgtttcaagctaaaggtgaaggtaagatgggatgggatgcgcttggaccttgatggtcattatacttcagcagacattatgaactgattccatgtgtgaggtaattcgaatgtaagtctacatgtcaccaaataccattgtttagagtgcgtctgccccaatccaagattccactgagataagactagggtctcgttagatctgactgcagtgatggtgttggtggctctcatctctaaccactgctgctgctttcctgccccctggtaccgttagtcaaccatgggtctcttgtgtcccttgcatactcagcagacactctgccattgggcaccacaatttcccttgaagtttttgagctatgaatagaaattgcgagtcagaagttgctttattttcttattttttatttttttatttttttgagatagggtctccttctgtagccaggctgaccttaaactctcaacaatccccctacctcatagcctctaggattatggctctgagccactgtaccaattaaagtcattattgacatgtttcttgagacagggtttctctgtagccctggctgtcctggaactcactttgtagaccaggctggtctcaaactcagaaatccacctgcctctccctcccaagtgctgggattaaaggcgtgcaccaccatgcctggctattgccatgtttcttgtttcattagtatcactattattgttgttgttattattgatatatcgttttctgggacaggatcttgctatgtagtcatgcctggccttagacttgtaccgctcctcacgcctcagcttgcgagtgctgggagacacagcgtcttcctggcacagctgacatttcacgggtgtctgagcaggagtacaggctgtaataagtagtgctggcaaggcatgcttttcaggggagtggtgtgggaaagctggtcattactgagtttcgagaacccttcagaccttggtctttccgttcgtgggtggatcaggcagcacaaggtgaaaggagaagtcgctttcatggagttaaaaccagtgaacctgaagactttctcggctaaacagatgtaggctatgaatggcctggatcgtttggccaccaacagccagaaacctggtcgtgaagccaatccaatagcaggcagagacaggcaagccagtgtagcctgcttttctacaggtcctgtgcttgtagggaatattgaagcccatgaaatgctttcccacatttaatatcatttgataaatctcagaaagagtgctctgtgtgtgcagttatcgtattttatatgcatggaagcggaggtgtggggatccaataatttctacaattttgttccatccaaaatacttttgtgtattgggatgttttataatgaaatgaaaagtcaaatgtgaaaatattgtatttatacataaacacacacatacatacagcacatgcaggcgcacatacatgtttgtcagaggataatgtgggggagtgagttgttgcattatagcttgttgaagcagggtttccattggcactgctgctgtgctgaacatttcaggctagctgtcccgagagctacgatgcattctcttgcatttcctctcatctcacgacaggagcgctggggttggagatggagatggagatgggtaccactgcatctgacttttttttttttttgcgggttctgggggttgaattcagcccaccagaaagcaccaagttaagtggtctcatttaaaaagtcttttcttattttcattcagaaatgaggtcttgcagggcaatggtaacacacaactttaatcccagcacttggggaggcagaggcaggaggagctctgtcagtttgtggccagcctgttctacagagggaggtccaaaatagccagagatacagtgaatccctgtctttacaaacaaaacaaaacaaacaaaacaccaaaaacaaaacaaaaatcaaacccagaaatgaggtcttgccagaattgttagctacttggttttctattgaggctatgagtgacaccttcaatgtgtggaaactagatcaaattttagaaaagacattgatattgacaagaaagattttttttaagaaataaaatttcaatcataaaatgaagctgcttaaataatcggtggttatttagtctctacttatggaaataaacttcttgtctcttaaggtatcagagcaaattaaagctgatccgggctaaggaagaagacagtggccattacaccattatagttcaaaatgaggatgacgtgaagagttacacgtttgagctgtcaaccctaggtatgtaaaggtcgtgctcgctcacgggtgactgtcccccagaggcacctcggctcttctcttcaaagccttggaggagaagccagaccttggggtagaggctgggtctgacgcatgtcaggaccgtgttgtcgtgcctgaaaattcaggtccatttggaacagtcctcatccaaaaactctgaaatggccccaaatcggaaactttgatttttatcaggggaggtgttgagatagtttatgtatgtagcccaggctagcaatgctcttgtctcagctgtagcccaggctagcaatgcccctgcctcagcctcccaagtgctgagattctagacacttgtcaccacatctagttcaaaatctgaaacattttgaatgctcacacgatgttacaagtggaacatcctgacctgacatcttgtgacaggtcagaaaatattcaggcatataaaaatattgtgtaaaattaccgcttggttatgtgtatgaggtgtatgtgagatataaatgaattgcatacttaggctgagtcctttcctaagacacctatctcattaggatctaacttctgaaatctaaaacacttctggagaaaaatatgtgctgaggaaaaattttaaagtaaagtatgtattataaagtttaaattcttattttagtttttaaaatatttaatatttatttagttttgtgtagtttaaattatttactttaaatcaaagtatataaaggtaaactaaaacttgcatatttttcagcttattctttatttttattactattattattatcatcgtcatttggtacttgaatcccatgctttaaaaacaaatcaaggagctagagagagagctcaatggttaagagcacttgctgctcttgcagaggactggggtttggattctgacatccacatggtggtttacaaccatctttaactccagttgcaggggatctgataccctcttctggcctccgcaaacaccagacacgaatgtggtgcctattcatatacgcaagcaaaacacttgcctgcctctaacttatttgactacaaattggtgaaaagatctttaaagtctaatgatggcccccagacgcttgagtgaaggctgctttcatcagatccattagtcaaatcccgaatgcaaagatagctggaggatctcccttgccttccgaatggaaggaccccagcccaggcactcctcacctccctccgtccagatctgagtcatccaggcacaaagcccccaaacacgggcactgagggagctattaactgagtgggtctgtccaggctggagttgttctgttctgtcttccacaaccggtcccttgaggaccgttcctgaaccgacgggacccttccgcggagggatgtccctccacagccagagacaagagctgctctgccctgacttctcctttcctttcccagttcctgcatccattttggatctcgtagatgaccaccatggctctggcgggggacagactgtgaggtgtacagccgaaggcacccctcttccagaaatcgactggatgatctgcaagcatattaagaagtatggaaaccagatgttccctgttcttgtgtggtcgggatgtttcttccatgacataaagggcctcaagtgcagtttatttctttggttgacctctttttgtattcgcgattcttcctcggcccaaggctcatattactcacaaactatacaataggtttctgaaagtggattccatctcttgatgtgtgtgtgcgcgcacgcatgtgtgcatgtcctcaaagggcctttatttttatattttattctccattgtttttcttaaacatttcccattctctcttagaatgctctataatgtgaagacaaaaagaattgtaagaaccactcttgttcatggattttatctgtatatgtatgtatgtatgtatgtatgtatgtatgtatttagcttgcagtcctgttgtgacataatgtctcactcaccgtgtagccagtgctttggctgaagtcaaacgtaccattctcttgctttgctctcccaggcgctggggttgcaggagtgcaccaccagccctgcccagctcacatttctttctttctttctttttttttaaagatttatttatttatttatttatttatttatttacttatttattatatgtaagtacactgtagctgtcttcagacactccacaagagaacatcagatttcattacggatggttgtgagccaccatgtggttgctgggatttgaactcaggaccttcagaagagcagtcttaaccactgagctgtctcaccagctcccagctcacatttcttatttcttaccataaatgttgtctcggtggctagactggcagtgcaaacagagccgagagccgtgcccacgtgactcctcatacccacttgttctttggaagccaggagagggcactggatcccctgaaggtggagtaacaggtggttgtgagcattttagtaggaatgctgggaaccaaatgtgggccctccataagaacagtatgagcgcttcatggccggcccacctctctagcccctcctccaccttcataggcaggcccatgaactgtgcgcccacaccttgctccacggcaactacctgctttcagaaggccttgagtgcgtctctgctgaaagtgcagcttgctattgctctcctcactgagagctgtggagtgacctgggtcctgggatttctaggtgtaatgatttaacccagaagactactgcagccttagggaccccttagaagctcttcctggggttgaagatgaggagggaggatattttcaaaggagtgggagatttgcattgttgaacgtgtttgatgctatctcctgagtttgctcacaggtccaagatttgagataagtagttagattttgtggattttatctgcctcctccacaaaccattaactttggttatccacgtgagattactcctcttgagcaggtgcaaatggattttaatgtgaacaagcaccataaaacgagaactcccaaatctatgcaccataaaacaaggactgccccaccccccaaatatatgtaatgttagcaatgtggaagggtcgttgtgactcctggtaatcagatcttcatttgtgtcacattctctctagatgtaataatgacacttcgtggacagttttggccagcaatgtctcaaatattatcacagagctccctcgccgtggcaggagtaccgtggagggacgagtgtccttcgccaaagtggaagagaccatcgcagttcgatgcctggcaaagaacaacctcagcgttgtggcccgtgagctgaagctggtggctcccagtgagtttctcagtaggcagcacaactccagctcaccagccacgccctgtgttcctcaggtgggacgtggaatcccagacagggctcacagagtggcaaaggtcccaagacagttcagccctgtctggacttgaagcactggtcttcctgccaagccccctttgtttgccctgacccagctgcgtttgcagagctgcaggcagctttgcttgtcatgtagaggatgactaagcctctgtcatctgagcactggggtctagggatagaaagtgaggaaggggcttttgcctcacgatcctcagaacaggtgggtcaggtttgagtcagaaacaaagaaaggaaggaagccgagaaagagagagagagagagagagagacagagacagagacagagacagagacagaccgagagacagacagacagacagacagacagaaggcaaaattcacctttaccatgaaacttatgagatggatatttctacaaataaagttgctcctaacttattgttggtctccatcgtctttattcaaattgtccaaaaggagatccttggagtgtctttggaaagaaagtctttgtcccagggaagaatcacatttagttgcaagggtacaagtgattgagggatgatataggccacccctaaagtgacctgggatccccaacacttccccaccagcagggagataggccctagttcatttctttctgcctcccgtcttattctgccgtccacaaataactgacaaaattctctactgtctctgtcttgccttccagctctgcgatctgaactcacagtggcggccgcagtgttggtgctgttggtgattgtcattgtctctctcatcgtcctggtggtcatttggaagcaggtgagtctttggaaccattagaatgagaacaactgtatccttcggtgtttggttcagagaaggggtttggtaattccatgggtggtgggtcatgacagactttcctgggtccagtcactttggttctgtagtgaagctcagttgccttgaactctgggaattcaccagttacccaccctggtcattacagaaaccacggtatgaaattcgctggagggttatcgagtcaatcagccccgatggacatgagtatatctatgtggaccccatgcagttgccttacgactccagatgggaattcccgagagatggcctcgtgcttggtaagttcttgtgagggtaacctcccaggaccccaatgttacctacatagcttgctacgtacagatctgggacagaattagggacttgaacgccactcacagagctggatatggtagctcacactcttcatctcagcactggggagactgaagatggaggactgtgagttcaagactagcctgggctacatggacatcttcaacatgagctcattggggctgagaaggggaagtcaagggtcaagaagttgtttagcctttgtaaggccccagattctatcccccaaacgaacaaagttagtgcaccgggtatagtagcatacagttggagggcatcagcagacggatcctgagttcactctcatactgggtttcaggccagcctaggctacatgagaccctagagcaaaatgccaaaaggaaagagtcttttcttttttttaatgcacgtgagtacactgtagctcagacacaccagaagagggcatcagatcccattacagatggttgtgagccaccatgccgttgctgggaattgaactcaggacctctggaagagcaatcagtgctcttaacggctgagccatctgtctagcccatagaaagaaagtcttaattgtatcattggaatgattttggcctgacaaaaatattgcaatggaaaaaataaagttcatttttataaccgaagaggactagctgagaagtgagagaactcagtgggctacagtcagtccgttttgaggagtcataaaatacttctttaagtatatgtaatgtaggatggaaaaatatacgctggtgttgtactgcatgcctctaatctcagagacgtagtattgggagtccaaggtcattgttaactatatagagattttgagactagcctgagctatatgagatcctgtctcaaaaccccccaaacannnnnnnnnnnnnnnnnnnnacacacacacacacacacacacacactttaaagcaaaacataaaaaggaagggagccctctggggctatgtcacaatcaaggccctcgccaggtgcagtttttggctatcgtctgtctgtctgtctgtctgtctggttccaaagtacagcagagctaggcgcttaacagtcactcaagctgaacctgtgcttctttattgtattgtccaccactgtttcccacacagagcttagggaagttaaaaagcagtaaaataggcagggagggtgggtgggtgggtgtgcgcgagtgctcgctcagaggtggggatggagtagcagagcccctgctatccagcacgttgcctcgtcctcttggcaaggccacattactggaaaagcagcatctttctaggcatggatggcggaggtacatacagaccggaagagcgggcatgtccactctcagtgtctttctgtgcctgggctgccgtgatcagactggcttcctggaaatgcctcccttagaccacagtctctttaagagtggacaacagctttgatttctttgtctctacacacaaagaagggctgtgctggcacgtacacccccccatcccccccccccccaagtccagggaccttggtggcacgtacagcttctggtccaggaaccttcctttatgacaaagaagacgagtccaagtgttcagtagtgcactcctcagaatcagtggcatttggaatacagacgatttccagtggttaaggatttgttaatgcaaaggttgcctctgtgtgcatctgagagacagaagggtagagaaccagggggttgggtagaagccacggaggcaagtgcacaggagcccagggcctggcgggagcccatgttcacaccagggaggactgtgctttcccctctctcatccatgttttcctttccattgcaaatgccatttgacaaaagcaattacactaattcccttccctgtgggctcaattcttttttttggacatgatgacttggaggaataattaggcttactcaacacaggaaaaacacccacccagctgtacaccctcgtgcactggcctctgccagtgaggccgaggggccgggagctggcggtgatggctctgtttgcctacaggtcggattttgggatccggtgcatttgggaaagtggtcgaaggtacagcttatggattaagccggtcccaacctgtaatgaaggtggctgtgaagatgctcaaacgtaagtgtttcttcccagggatactttgaacatggacatactaagtaatttaagagtaaaatcgaatttaatattatattgagattctttggactgtgggttgagacttagccaccctccaaaattaggtttcttttgttcttatccctcattgttaaaaatcagatgctttcatttttggtaagagtttgtttttttgtttttttgtttttaatcttaaagaccagagactctggggctgggaaatggctcaatgggcaaagtgctttctgcgaaaacatggagatctgagctctgatccccccagcatccatctaggaaggcagaagtagtggcattcccctgtagccccaaccccacagggaggcaggatgagacaggtaaatcctggaagctcactggtcagctaggttactcaactcggcaagctctcaggttcactgagagaccctgactcaaaatataagatgtagaaacagttgaagaagatattctgatgtcagcctctggcttccatgtgtatttgtagacaagggcattcacacacacagacacacacacacacagacacacacacactcagcagtctagactgaggagaccatctagtgctcttcctttagactcttggtaaataaatactattgaatcacaaggttccatgtgttcttctgagaaccagaagtagggagttcagttgtactaaaatctggcttacttcaacagccacagccaggtctagtgaaaagcaggctctcatgtctgagctgaagataatgactcacctggggccacatttgaacattgtgaacttgctgggagcctgcaccaagtcaggtaggcgccttgttctggggttcctgggagtttctgggaatcctctttgttgtggaaactttttgttttgttttgttttggtttttcgagacagggtttctttgtgtagccctggctgtcctataactcactttgtagaccaggctggccttgaaccaagaaatccacctgcctctgcctcccgagtgctgggattaaaggcatgcaccaccacgcccggcttattgcaggaacttttgaaccagtctcaggcacagattgccctctctgcacccccaaacatgcctcctgaggataaagctcatacgtggagctcactgggtcccccgactttttggaagttcatgggttcagagaaagaatggcttctttctgttctccatttttatactggactgtttggtacccacaggtcccatttacatcatcacagaatactgcttctatggggatttggtcaactacttgcataagaacagagatagcttcatgagccaacacccagagaagccgaagaaagacctggacatctttggattgaatcctgcagacgagagcacaagaaggtaaacatgagaggagcacgtgtgtccttgtgtcggactcagacatggagaaaagcctgtcctgacaggttccaggcctgcagatcctaggccagcaccagaagccacgaggctgggagcctacctagccatccgcgtcagtgtggatgggtacacactgcaggtgtcttgggctaggtcatcacatggcaaggctgtactgattggtttgaatgacggggtgagggggggtgggatccttctgagagccattctcttctctgtatgtgctttctcaggacatgtcaaaggatgtcattagtgctcatccccaggacgagttgttggtccttgctgaacctgggccagggatattcgcttgtctctactgataaaacttccaggtgtccgtaaagacccctgagagtagacggacctcccatgctcttgagtcacttaatgggctccaaatgggtggtcagtttaatgagtcgcaggaactgtgtgtctgagccacatggccacatggccactgaaccttcaggggacagtgactgccttcctgtcatgaacttttcaacagtttagtgtagcagactaagaatgtttcttgtgtttatgggaatgtagcccccaccctgacttccctgtggctcctggggatgtctctgctccttgtgaggatgtgtagaagacagagaagtaaaacatgaagaatcgggctggagagatggctcagcgattaagagcactgaatgcccttccagaggtcctgagtgcaaatcccagcaactacatggtggctcacaaccatctgtaatgggatccgatgccctcttctcgtgtgtctgaagacagctacagtgtacttacatataataaataaataaataaataaataaataaaaccaggaagaatcatggagactaccttttggggaccccagctggccctaagatgtttcccttctatttagatggtatcgatgtacggactctttagaagtgcttgcttactcctggatagagttctgatgccttccatgtcaccagagtcatcctcccttcccatcacactgggtttgagatgacctgtgcgctcatgtctgattaatgttcatctgtctgtctggaccaccccatgcacagtgtgcccatggggattgtttatgctcatccccaagcccttgatacctctctcagttaatggcacactctaggtacccaaattagcatgtgtttagttctctactgagtgactgcattagaggccacccggggtgaaatttcttcttcttcttttttttttttttttacacagttatgtgattttgtcttttgaaaataacggcgactacatggacatgaagcaagctgataccacacagtatgtccccatgcttgaaaggaaagaggtttctaaatactctgacatccagagatcgctgtacgatcggccagcctcctacaagaagaaatccatgctaggtaaaagtgcccatgctcattctggcaaatatgatctttctgtggtttaacttgctgctcagagggagggaaaccgggatgacaggtagctctgccaagcagtgtgctccctaagtgcacggctgcgcagctgggccaagatagctttttgtagatttgtgctctatgtgtgagaagaataaagacgcagggttgctgatgtagccctatggtatattgcttgcccggtgtatacacagttccttctctggaactgaagaaaaagtatatactattgtaataataataataataataaagacagatataatgtaatcaatttctcagactttaaatgtagtggctttaaataaataattcattctgctatgatggtctttgcttgttaacatgtcttttgttaaaaaaaaaatggaagtggtgataattggtgttttctcaatggccaatctgaaagttggcaatcttacattgtttcctcacattttttgttttgttttgtttttcctgtgagcgccataatcctggcttttagctctcctaatgtacatgttgtgacactaactggagagcagacagtttgaggttgcagtatctgacaagtgttcctgttgacttttgtttgaaagcaaacccccctcctgttttgaaaactgtgctgggatgagttcatttgtaaactccggggtgccaccggtgatgccacaccagatgggccacctcatgccagctctggggtggcgactccagggctcttgcttaaccacacactcgaagtgagcagtatctaggcaggcctgagcttttcctgtgattctggttttggggggggaagggggggaattgaggctctcatcagctgctgcaataatattcagctgccatggagattgttttttgaaaaatcgctaacatgctctgaatgctttcagggttcttaagtgaaaggtacaagccattaaaaagtatgtgctggctttgcaaaacttaagcacgtaataatattttccagttctgtagctccgtccacttcccattgccaaatggttgaacttccaaaccttcttaaagtttacccagtgagagttgttggaacgctgttacctttccactcccaaatggttaaaaatagtttgcactgcttcccaggcagagctggtggacttggcaccagggagagggggcccgagtcatgcttgccctgggtcctgctggcaggcagaccacagttttctggccttcctatagctggctgaaaaaaaaatggctggagctgctcatcaccggcctgcaaatcatcaaaaagtactgagcaccactggcctagattgcctgcctcctgagtgtgtgtgtgcagggcagtggacaggttgcaaggggaggtccatgccccatcctgggcacggcccttgaggatggctgcctgctctgttcaggaggtgatttaactggcaaattagacacaaagcaaaataggaaagaaagcaaacctcagaatcatcatggatggtttcagtgtgtgtgtgtgtgtgtgtgtgtgtgtgtgtgtgtgtgtgtgtgtgtgtgtatgtgagagagagagagagagactccaagatggctgaggtgatgtgacaaggtcaaaagtgaaatccaaggtcaaccgacaatctgtctgtgagattccgtggagggagtaggtttgactaatcattgtgtgtataattctccccctgccccgcccagtctgtgtttgtgcctgccggatgaatatctcttatctgaaacgcttggaactgaatgtgttttgaatatatttttttcaaattttggaatatttgcatatacataatgagatatcttgggtttgggagccaagtctaagcacaaattcatgcctgtttcatgcacacctcagacacatagctgacagtaattttatacaatatttttttagtgtgcttgtgttttgactgtgatctgtcacatgaagtctggcatgaggatacttttaccagcgtgctggtgctaaataagttttggatgtttgaagcatttcggagtcaggattttgggtctgggatgctcaacctgtgtatatttcttttggaagaaagaactattattttgttcctttctatttttatagtactagggcatgaaacgtgtgcctcgtgcctcctgggaaaatgctctaccactgagccacacccacagcctcctttgtatacttttttgtacctagtaaagtctaaaaattatgacaaaaatgtgttcaaaagagatctttgggcaagcttctgcaacctgccagacaaggggatggctgggtactgggacgccccccccaccccacttttacctaacaccaacatatttggttccttcccacagactcagaagtcaaaaacctcctttcggacgatgactccgagggtctgactttgctggatctattgagcttcacctatcaagttgctcgaggaatggaatttttggcttcgaaaaatgtaagttcaaggcccagagacctcttcagacccagccatgccttcagagggaggggcatgggaggaaattggaggaggaaggtctaagagccagagtatcagctgctcagtttaacccgcctctctcacttcccctaataggctgggagtgtgactcactgggagtctgcctttctccaggaggagtcagggaggggagggaaagggcttcctgccagggcacttttaagtgcccatcatggactgggtggtcttgcaggagtgctgcaactgggccttggctggagccattctgaagtgatttcttttcttcccacgtagtgtgtccaccgggacctggctgcccgcaacgtcctcctggcgcaaggaaaaattgtgaagatctgtgattttggcctggccagagacatcatgcacgattccaactacgtgtcaaaaggcagtgtatgttcccgccgtcctcgatccttctttccccatccctttaatctcagaagttctgttatttcttaattcaggagccagttatcagctggttccagaggtctcatagggaaagcttaggtataacagtcagacagcctggtatcagctccaccctatactagggttgctgtttggtgaagtctcttgtctatttcatgcctcagtttctctgtttgtagcttcatccgtttcctaaattactacaagggaatgatttaggtaattcacacaaagtgccgtagacagtgctggacatatagaaacatctatcaggatctggatagatggctcactgtcacatgctggtcttccagaggatctgggtacaatttccagccctcataaggcagctcacaaccacctgtaactacaggtctagggatctgatgccatcttttggcttccgatccatgtagcatacagacattgcaggcaaaacacccatatgtgcaaaattaaaaattaaaaaaaaacaattagacacatgcagtgttatttcctagtaaatcaagtgtgtacatgaatatacaagtgttcatttccaggggagagctctagtttttaaacctctcaccagatttccaacagaccagtttaaccttgagaacatcaagactgcttgaatagatagaacatcaccgtttctttggtgatagtttcattgtctacttgatcctccctcttccatcccttcagcctgtaagcccaggagtcgctgaggacacatctgtcacccattggtgcaattatatgtccctctgttccactgatgtaagacagcttactgggctgcagcctctgcttagaggacagtaatctctgtccgtgctctgtgccccggactcgggctcaatgactgtagccgtggctcctcccaggcaccccgaacaagttgctaaacttgggtggagatgatttcttacctaaggttatgaatgtctactatttcttcgtagtctgggggaaggggtgtgtgtgtgtggaaggatgctaacatgaagggcgctgtgttatatatcttcccagacttagtatttcacctgctgtttggaccacctttgcaaaagagacgcgtttgagtgtcttgtctttcggtggtagaaaaccaaacttatttcttactgcttggaagctgacactggtttccaggatgctgtatctatctattcttagttttgttcctagggtggcctgaaaactggtctggtcgaaggccacactttattggtaaattgaaggttgaatatgcttagcatatcattcctttggaagctatgagaagtggcgttgaccactccttgtctgttattattaagaatctacacagtggggctaaagagagagctctgagagtgacgtgtttgctgtgtaagcaagggcacctgagtttgatgtccagaaagcccgacatagtggccagtgcttgtaacctctgtgctggggagtcagggacagacccctcgagctccttggctagatattctagctgaattggtgagtcccaggccaggagagagcctttgacctccacatgcacacacactcatgcaacaagtacttgcatacacacgggcatacacacacatacacacaacctacctagttgctggtgaacagtaaacccatgagagacagaatgctggcaagatctttaatgcattattcccagcccaaggagaacccctttctgtttctccagacatcagagcgtagcccgtgggttcatttcctctctcctttcccacagactttcctgcctgtgaagtggatggcacccgagagcatcttcgacaacctctacaccacgctgagtgacgtctggtcctatggcattctgctctgggaaatcttttcccttggtaagagctcaacggctactgtggctcattctgaatggcactagaagggacatgagtctgtcccagttccagggggacacatgcagtgtcaaccagtcacactgaagcctcactccacaggtttacccctaccatgtctgacataggctgagtagatccagtcagggtctctgtgggctgcttcctcacccctggctactggcactctggttatgcgggagtcacttgcccccgtgggaagtgtttcccatggcatctgccttttcattttgaccttgattagagagatcaccaatagttcctctcccttacttgatgatgaatgatgcccaggtgaaaggtgatgtggcagggaacccgaggggtgtatgtaactccacatctcaaagagaaaaaaaccgttcttaacattcggtcacttgtcattagggcctgagcaaatcaggtgcctgctgccaagggagggttgtaagggaatagtgaggtttgactggactttggggatatacagattacacacttagaggtaaaccctgtaagctgtagtgtgggttcagagacaagacaaaggagacttggagtcgttttggaaacttcagagagggaattgaacttgacttggccttggccatcccacacactgctaccccttcagttctcctttttctgaggccctgcatgcccttaaaacatcagactatggactgccaggtcctagctttgccttgggctgtgatttgtgaacacttctgaagatgatgttctttagtggcgtagaacacctctccgcctcgttcgtgtgtttgcatttagatgtggttgctagaaacagcattcagtgcgttagtgaattttgtgctaaagttgcccaagacgcttggatttagtcacccaagaccgctatggcaagtctgaaaagtcctctggagtcaaggagatgaaaatatacagattctttgaaagaatcaggccctcaggggttcaggatcaaaggtgtgtggtacaaggaaaaaccctctgtcatcgggttatctctggctcgtaggtggcacaccctatcctggcatgatggtcgattctactttctacaataagatcaagagtggataccggatggccaaacctgaccatgccaccagtgaagtgtgagcttcctcctcacccacgggcccatgtccacacttgggggggggtgtctgtggggtggctgccgtctacgggcaggcccacactcactctgagctctgcctctgcagctatgagatcatggtgcagtgctggaacagtgagcccgagaagagaccctccttctaccacctcagcgagatagtggagaacctgttgccgggacaatacaagaaggttggttcgagcctgtgacagtgggcaggaggaggcgggaaggaggagagactagtgagcagttatgccaacaagcagagctgctctgagctgtttgaaaggaacgctttcaaaggaggacacggattgtgtgatcttgtgaccagggctttggggagtgctctataggaccccagtagcactgatgaatgagagcccctccctgcctttccacagggctctctttcatcttaggtgtgagacacctgtaggcacttcattctccagacatctgagtatctgaagctaccaagcagttagaactctcaggacatctgaggccattaaattgctcatttgaatacacttaaatccatttgaaactggtttttaccagctgactggaggggacaatcccagctgttatctgtgactccagctggttttcagtggcacagaaagcattgttcaaagggacaaatgtaatttcacgggacctacgcaggagccgtaaatgaatgtgacaattttccgccgaggccttgagaggggaagccgcacactcccgtgtgatgaatctcatctcagactaggcaccgcagaccgactcggttctcttccctcttgagaggcaacatcagtgatttgccctagagcctctcatcatttgagctgaaagttcagtgtgtcagttttggtccctcagcaccggtttctcctcacattcgtgatgctgggatcgtgtaggggtaatttacctaggtcagtggaaggttctctgttggtgggaagaggaagacactactgctaaaactagttgtctgattctgtctgtttcggccggtgccgcatacacagacggcgaaaatctacgtggtgtgttgactagggtgtgtgcctcagaggggcatagctaggtaatttgtttttgtttgtttgtttgtttgtttgttttttgagacagggtttttctgtgtagccctggctgtcctggaactcacactgtagagcaggctggcctcaaactcatagatctagagatctgccagcctctgcctttgaagtgctgggattaaagatgttcatcatgatgcccaatttacgtttaggcttttttttttctttttgaatctagcctccatacagacttccggtatggatatatagcccccctccccccatcagcataacctcatcactattgattgatttattgattgatttgttgttgctttcttgctgatggccactttgactgggtgagtggcttttcttctttctccagtggctaaggatattgaatgctttttaaaggatttattgaatatttacatttattcttttgaaagctaaatagtcagtttattagccaatttattgactgagtatttgtgtgagtgtgtttgctgctctttatatagcctgcatactaatccattgtctgatgtatatttatatatgtggcagagctttccccccaattctttaccttctcttttcacttttgtgactgttcccaaaaaacaaaccacaaaagctttattatttctttcctcttttattattttattgttttgtcttgtgggtttttttttgttgttgttgttgttgtttgagtttttttgagacagggtctcactttgtgtctctggctgacctggaacttgctaggtagaactcatagagttcttccttcctcttcctccctagtattagaatccaccacacctggatatatatttactgttttacacaaggtctcactatgtaactgtggctggcctggaactctctaagtagacctagctgacctcagcaaggttctgcatgcctctacttcctggattgaaggcatgtgtcaccacacccagctttacattccatttgatcctatttgtcattattttatgtgtgtgagacaaggtctcactatgtagccctggctgtcttggaactcgcaaagatcctcctgtctttgagtgttgggattaatggcaaacatcacttgcccagacccacttgctagtccttgatcatttcctgtgcttttggagtctgactcagaaaggtcttgtctatgtctacatcttgaaatttttttctactaagtctcaaagctttaagtctttcattcaggactttgattcattttgaactgagttctgttcttctagttttccaagttgttaaataggctgtcttctctccagcgtcagcttggcctccctatgtcaaataggtggctatatctgtgtgcttatttctggatcgtctatcttgttccaattgatacatttatttatagttatatagttatagataaactagttatatatatgatatatatatataggctctattatatagtttgaggtcaggtattatgagtctggggattataatatttcaaacattgctctagctatttggggtcttttttttatatgaattttagaattgcatttttagttctgtaaaaaaaatgttgaaatttgttggggattgtgttgaagccaggcttagaaaggcaagaaccatgtttcttctaaatatagaaactaatttaaaattatgtgtgtatacatatatacacatgtgtgcacttatttatctaaatactaattttatttttaaattttaacttatgggtatatgagcatatgactgcttgtgtgtgtatatatatatatatatatatatatatatatatatatataatcacgtgtgtgtgtgtgtgtgtgtgtgtgtgtgtgtgtctgtggaggccagaagtgggtgtggaaatttttagaactggaataatataaggttgtgagccacctaatgtggatgctgggaactgaacttgtgtcctctgcaagagcaacaaatgctcttaaccactgagccatctcaccagtctctatatgtaaatgtatacctgcacatgcgcacacctaaacatatgtgtatgcgtaggtcaggaagcaagaaaggggatcgtgagaagggaggaagagagcttaaaggttggggtggagagagtcatgaaatatatgtggtaaattacatgttctaaaagtctgcatttattttacagtttgtcagtaacatctgattaattgtgttaaatgaatactttcagagttatgaaaagattcacctggacttcctaaagagtgaccatccggccgtggcacgcatgcgggtggactctgataatgcgtacatcggtgtcacttacaaaaatgaagaggataagctgaaggactgggaaggtggcctggacgaacagagactgagcgctgacagtggctacatcatccccctgccagacattgaccctgttccagaggaggaagacctgggcaagaggaacagacacaggtaactacagccaccttcctcgtgctagcctgcaggggaggactcagggagactgaggccaccagggatgtaaactgtgcgtgggcaacaggtgcatcattccagggtaggtcacaaaggtttgaaaatacctcccatgtgattctgaggtgtcctcttactcctggtgagcgcttcgtttggtcaccaaagctggtgatgaaaagctccactctgagctcatttttttgatttatttatttattatatgtaagtacactgtagctgtcctctgacatcccagaagtgggcatcagacctcattatggatggttgtgagccatcatgtggttgctgggatttgaactcaagaccttcggaagagcagtcagcgctcttaaccactgagccatctctccagccccactctgagctcttttttttaaaaaattaggtattttcctcatttacatttccaatgctatcccaaaagtcccccatacccccccccccactctgagctcttaaacagccatggagcaaggaaaaccttgagagaggcggggttgggatatgaggtgctccatcaacagcctttagccttgcatgcggtgcagaactagctggggaggactttcaaactgctgattcacaggcctctcaccctgtcagtctgtctgtccctccttcctctggtgggctgccttctacttctgttttgtgtgacgcatagggaagccacctcacaaaggggaaggagtcgggggttctacccacctgcagatgatcgtgaatttcaaagactcagatggacaaggcacatggtgacccaaggcagaatatggaaaagccagcaagaatctagagaagggaggagaggtggggattttgggcaggctggtgattttagggatagtaacactaacacctaacacttttgttttaaaagtgtttagtacacagtagcagtgagtacacctcccaattagtgggtacaggggttgacatttgccccattctctttatccagattggtgtcacataaatcatcatgactacagacacacacacacacacacacacacacacacacacacacacttatttctcacccagtgactgaaagctaagtagaaaacaccaagataattcattcctagtattctgcgacactctttcctaagaatacgatcattcatgctgtgtctatcatgaccacacggaagagagtgaactgttaaagaaaattagagttggaggtatagaattcatgttggccatatctgaggccataggttcacatccctgtactgaaagaaaaaagagaagaagaaaaggaagccaacaaccggtctcagattcatttcatacctgggctttattcaaattcagttgaataataactgctaatttattgagctctttatatgtttatagttatcagattattatcgtatttaatcatctcagagatctttatttttatttttattatgtatattttacttttgagattatatttatgtgtgtgtgtacagatctgtacacctaagtatgtgactgcaaccggcttagactgtatgatactcgtatgtgtacgttttcggggctgaccatttggtattggatagccaatttggtgtattcgtccctggggaaggccctttttctggttctcaaccttccttcgttatctgtcgctcttggtctagaaaagaggctgcctgagctccttgcttacccattaccgtgcctattggtgccgttctggtgcaggtcttgcgggcaaggcttctatgccttgtgtaaatggtaaactgaagacttttctcttctgggcctttagacccagaggggcggggtgaacaagaggcaggggcctggcaggaagtgaaggaagtgtgggatcccatccttctgcttcctaaggttttttttttcccttctctctcagtaccttttgattggctgttgcttgttctctcccctgataggctgaggagggaaagtagaaactcttactcttgttagccacgcccacaaaagacccctggcaggaaaggcagcaaactgacctgcgcagttggccctgttttggttttgtgttggctctgtgcagcaatggccagtgagtggctggctggctcagccgctcactggccatgctcggccactcatgcttcaacaggaaaggaccttgtgcatgaggaaagagtcccgctgcttcaggcagccaccctggaaatgcagccccgtaggcagtctgtccatgaccttagcctttgcttttcaatcccatcagctcacagacttcggaagagagtgccatcgagacaggttccagtagttccaccttcatcaagagagaggacgagaccatcgaggacatcgacatgatggatgacattggtatagattcctcggacctggtggaggacagcttcctgtaactgacacgctccgggtatcatcttctccgggagcctcctcgggataaccttaagaaaaccacttcattgcaatgcaaaagttgagaagaggacttgggtgatgtggagagagaaagttcccgaggccgagggccttggtaagcctgtgtggatgactgggatacttggattgaactttatccgtgttgcctcttgcaacgcgtcagtagcatctcagcggcgtgtgcggtttggaaatggatggacaagagagtgactggccacagaagacgggctttgtgtttccagggcatgggtgagagtcccacacgcgccaacttgtactgcagacaactccagcattgtaattatgtaaataactcttaaccgaggatgggtttagatctgtgttaactctcctctccggacctctgaagagaccactcagtccacccgtgtgcttccttccttcttggaatccggtaccagctgctgttgaattttctcatgaagtacatgcaaaaccactttgaactttggaaggtactggaaccgtcgtgttttactgtcttgtaagtgttaaagaggcaaaaagataaaaactaaccaaccgtgagtagtaggtttgggtcttttagggcacccaagaattcctctgtatcttgtaatctgtacttataacactactactgtttaacaagaatgctaaatatgtaatccgtaacatgatttctttacagagaaagcacaattaaaacaaaacccttactaagaaggtgacaagtttggcagtttttgacatttatattaagtaacacgtttctcaataaagtataataggtttagcggattaaagttagcaaacactagagagcagagtgtaagtagttatccagaaagtcaaacctttttgttttgttctaagcagtctccctaatccaaggcactaggaacagttaatgacctctgaagtactgggataagcaaagcagaaacccggtgggtgtcctaagtgttctcagtagaaaggcgtacgcctgagcccagtgtgactcctcacgctgtgtgcgaccttctggaagagactcattcacaaaaaggactcagatgggcagaatgtccatcagatgggactcagatgtctctcctgaccagtgatggcttggatggatcccgcccatacctacttttaaagtctgtgacttttaaggatgcttcaacatcagcaccttactttttctctcttgtctcagacgagaaagaactgcaaaccctgagaccacaatggtgctgttgaatgaaggctatgtgggcatcagcttggctcttcccttcccaccattaactacagctacagttactagcctcaatggtgtcagacctttgccccagagatttggaattacaaggtctgacgggagcaggaagctatatatatgaactgcctggtgctcttgaatagtcagtgttcagaaacactggcttgggttactgttgggggagggcaactttgaaatttggaacggggctagaagtcaaccatgcaggaaggctactgtttaagttcttggcttcatgtcaataacatgtcaatgccacgtatgcagctattcctacccttgatttaagtttccaggcttggctgaggctgagaaagcaaacatcttgacttgggaacatcttcccattctagtcaacgtgggtaccacttccccctggatgggagaacctgagcttgctcgcctcaaagtgtgtccgggaatgatgcaagtctgtgtgtcaggtctttgtgcaaccagctccatattcggtggagaagattaaaaaaaaagttttctgaatttggggcctttaggtggtaggctatcaggagcatccgaactgtcaaagtggttagtgtgagttcattggcattctctgccatgtgtctaattgctgactctgtatgaatgaaacatgggctatgattactgcaatcactgtattgcttctagcaggtgacgctttggaaggcacagaagcaataacaaggtacttgactacctactggcataatctcaatgcaaaccccaactttcccttttcacagtaagtgtgaagactgagccagattggccaattgaaaaacaaaaacctgactagagtctttcgagccaattagacttgaactacatccgtctttctagactcgtggctggagcagtctgtttaccactcatttgcacagcctctgtttgttgcttctttttattctgatgtcgctttgggccttgcatgacaccatgaagttggatgatacttctcagaccagcagtttcccatctttagctgtacccacctctgagattcaatgggaatacgttcacttttgttttttgagacagggtctttctacgcagccctggctgccctggaactcactgtgtaaaccaggctagccttgaactctcagagatccactgtctctgtacccccagtgctgggattacaggcatgcaccaccacactcagcagggatacatttttatttttaaacagtgttttgactgtatcctgatttgttttctttctggcctcctgcagagtccctggaagaaaatttaccaatctttcctgctttctatttttatgatgacaatcaaagcttgcccgaggaacacaatttgtgacttttaaaaaaatgatcaatgatgtccttaaaaaaatgtggtctgccaacctgtacaaaatggtcctatatttgtgaagagggacgtaagataaaacgatgttatacatcgatatgtatatatctgttgctatgtagacttggagaatactgccaaaatgtgtatgacaagctgtatcactgcctttgtttatattttttttaactgtgatattccccacaggcacgttaactgttgcacttttgaatgtccaaaatttatattttagaagtaataaagagaaaaatactgacatgttcccaacatggtggtgtggtaagtgtgtgagagcgacttactccataggaagggtcttccaatacaagatggcttccagatacccctgttcatgttttgttttaaaaagtgtaaatggagatctttatatttcaataaatgatttattatatatgacttaacgttatgaaggtctaccacttctttcgctttgttttttagtttggtcagaattccacccaaccctctctctaatgttcatcctgttgttagtttgaggcaggatcttgttgtatagctctggttggcattgggctttctgattctcctgcttcagcctccaaagtactggtatcatagacatctagcacaatggccatcttttcctcctcctccccctcctccccctcctcgtcgtcctcctcctcctcctctccttcttttctgaatagactcactagttagtaaagcagttttcggcttacaggacatttgagtggaaactggagatctcccatatcccagttggcatcacacacgagtagcttccccgtctctatggtaacctatcagcatgtacactgatgagcctgcatccctgcgccatcacctgtgctgtgcttgagcatcctctgttacgtgcaggcaggtttatgtgcttcacattcgacagcctcctggtatctcatcagataaattagtgcaattaattaatgcagattattctcttaataattggaaaataggccccctgtttcagaataactcccaatttcagatagccaaatgacctcagagtgagaccgcctacagatccaggcctgtatccttcagcacaaggctgttcattgagtattggctccaccttggttcagcccaggaaggagctggattcctgggaataataacatgtctgtctgaacagcagctacacagttccgtcctctaacagacagtcctgtctaatttatctgctctagtgttttcgtttttttttttaattaggggattaaaaacttctaaaatgtaccatttacacttcttttgagtcttgcaataagcttttaaatattcctaccaaggcagggaagacatctcataggtgtagaaacgaaggaccccaagactaatgtaacgatagcactaggattagcaattccaaatatatgaattccactattatttgcatgatgagccagaaagaaagcaagagatactgagaatatcagcatgcagaagtagcttgcctggatcctttgatttttcaaagacaagtgatggacaagttcagcctggagaaactactctatgtgtttgtaatcagagcctttctttttcaggctgaaatacaccaggtctaataatggccattgtgattttaatagtggcgtgcttcatgaaaagcaactcaggaaaatggcctaccctatgagaatccatcataagcctggcaatttccctcaggataacagcaacagaaatgtttcattatcttcaactccaaatacacataaaggctaaatccaacagcatataatggtagcagtgtttataatagagacaattgtttcatctcataggaaaatgtgtgtgaaagtatatgtgtgttcttaattagctgtctatagcatcctgtcccacctggagacatgagtagcacccacgtcctaaagtataatggcgataacttcccaactaagttcatatgccagtaatggtccatcattcatacaaagaggagggagacgttgaggacagatgaggggaacatatttgcttcccctgccccaattctggtttataggctaattggaatttttaaaagctttgccacattagcccggcagatggcattttgcttcatcattgttcatgggtattaatgacttccccctggagcttgtgcatcctgtctgttttgaatttcatcacatttcacacgaactgctccaaacagaatcagaaccaggcttttctctgcagagactgggctggagattggtttggtctatgtaagttggaagcctgatcaggatgaagctgaaataaaaggaggcttttgtgggcctgggcttggctcttctgtcgtctcacgcatgttttgtttagctggctctcccaacgggctcccggttgaatcaggtgtatacagagccacttccagagtgaatgcatcctcatgagtctgggatgatcacacctcttttcttcctccctcaaaaggctgtgtttggttttcccatgagagcacggtgctaggccagccacaggaagccatttttaaaattaattctctccaagaatatttattatagaacagactcctctttgtgtagttgatctctaaaatgtgtaggcctaaatgaggaagcttgcagacttttttccaaccagctcatgatccaaggggaccattacatcacatagaacagcaggatagaacatcgcggttggagaccacacgccttgcttggagtaatgagaagtgtaaggtagtgtaagaacccagagtgctgctcgctgagtgctgttcactgagtgctgctcgctgagtgctgctcgctgagtgctgctcgctgagtgctgctagctgagtgctgttcactgagtgcacccgatgaagctgaagcttttccgcatgtggggaatacacataggcaaggggccgagggctgggagctggcagctttgtctatttcagatgctatctttgttctagttccggacagttccaaggcatctgcatatctctttccacacttatccctccaggtttcaactgtactgagcagggcattggtttaggccctgggattcagcaattattacagacgataaaaccgctgcattgtgtctatagtgcctcccccacagcacaggacagcactgttagagttacaaaggcagtgtctctctctgggggcagaggctgtcaggcttgcttgcagcttattgtagagtctagaatttctcttgtaaaaaagggatttttacgctagtgtgtgtgtggtatggtgtgtttggtgtgtgtgtgtggtatggtgtgtgtgtgtgtgtgtgttgtggtgtgtgtacatgtgtaggtatgtgtaagtgagtatactatgtacctgcagaggtcagaagtcttggatccactgatgctgaggttagaggccattgtgagctgctgagtgtgactggagctgaagtcaaaggtcattttgagccactcaattgagtgtggatggaaattgaacttgggtcctctgcaagagcagaatacactcttaactaatgagccatctcttttgccaagacctgtgtgttactgaggattctctagagtcacagaacttatggaatgtctctctctataaaaggaatttcttgtaatgacttacaatctttagtccaactaacacaacaatgggcagctgtgaatgggaagttcaagaatctagtagttgctcagtcccccaaggttaggtgtttcagctggtcttatgtgtaagctggaatcctgacgaagtaggttccaacagatgtgctggcaagtaagtgcaagaggatgaagaagagtgagtccatatataggcctccagtataagatgtggcccagattaaaggtgagtaccactattcctggatttggaaattgctttgtcccaggctggctttgaactcagaaatctgcttactttagtctcctgggattaaaggcatgtaccttacctgggcctaagctttttaatggccactatgcctcaagatctccatgttcagatctaggtcagaagtccatgtcttccagccttaagatatgttctccatttctggatggtcgttcattccagatgtagtcagagtgacaacctggaatagccatcacacctgaattactttttttatttgtttttgttttgtcttttttttttttctaagagagagtttactctgtgtatctttggctatcctgcaaattaattggcagaccaggctggtctcaaactcacagacatttgcctgcttctgtctcccagtgctgagattaaaggtgtgcatcaccatgctgggcttggatttcttaatgccgtcagtcctcagtagacatggagatcagcaccaggctcccatacaaacgtaaaactccccagtgcctcatgtaaggcaaagcaatatctgcacataacctatgcacgattatttgtacactccagagcatatctagtgtaggtacggtactcattgcaatgtaagccctgtgtaaatagcggttggacattatcattagagaatgataacaacacagaagtctatgcatgctttagtgcaatgcaacttacccagagcaagagtgaccatgctcaaccagtcctgaagagacagggggaggaggcacatctataaaggggcagaaggctactgaggttagatctgtgtgcatggaaagcccatagatccagagggcagaccatatgctgtaattattaatacatctacatatatttggttagtttacttacaaatatttttttttttttttaattttgtgtttgagccagggtctcactatgttgccagggttgacctggaactcactaagtgtctcagccgctcaagtgctgtgaccacagctatacagtcaccttgggctaatgatatttgaatgtgtgtgtatgtgtgtgtgtgtgttttaatttgtacttgtttctactttatagaaatgtaattgaccttatattctgacaccttgtaccctagtgtgcaaatcctttaaaatctctattctgcatctagattaaaacctggcatttgttttcctggatctgttttacgttgcatagcataatgacttccagttgcacccatttcgacccagatgtcatatttgcactgttttcatggctgcataaaaattctgttgtttgcatgcacacatcctctctgttgacggatgtctaggttggttcatttcctggcttttgtaaatagtcccacagcaccttgcgcatgtcttatattgttgttgtttgagacagggtttctctgtgtagttctggctgtcctggaacttactctgtagaccaggatagcctgcaactcacagagatctacctgcctctgcctcttaagttttgggatcaaaggcatgcaccaccatgcccagccttgccccgcttttacaattacatttcatgtatttatttggtgtctttctgtctgtctctctgtgtgcctgcagaggtcacaaggtcacaggatgcctagacatctgttctctcctctcactctgtgggtcctgggattgcactcaggttgccatctggcttggcaggtgacccactgagatgtccatcatgctattctcaaactcacagcaatcctcctgcctcagcctactatgtgctgggactatgggcttgtgccactacacttggcttaaatatttgacctaattctccattgaagctacttgagcttagaaagattatacactggtaaggcataaaatacatattgagatattcaagctatttgctcttgaagaagattaagtaatttacattttctttaaaaatgtcattgtcttgtaaattattagattaatgagctctaagttcttgataaccttcattcttttcttcttcttcttctttaatattggatggtgcgtaatgttgtcctcttgcccattagtggtattgaccattgtgtgctctgcttttttttttttttttttttttttgagacagggacttgatttgtagcccaacatagccttaaacttttggccatcctcctgactcagcccctcatgtattgcaagtccagatgcaacatcatccctgacttgctgtctcaatttttaattggtggttgtgacttgagcttgatcaattttatggatcatttcagcttttggtttcactgtttccctacccccagatctttgtcccatttctatttaactgactttccttctttattatttcttctgcccatttctgctctagttggctctttttgtcttccagcttcttgaggtagatcttcatttatttgagattataattcctgctaatcttgggattttgttttacagatttccccctaaagcattattttagcaacgtcttacaaatcctgtttaaatacagtaccataaataatttgaagtattatcacagtacaaagaaaggcaatggcctttcaataggctgggagaaatggaagaaaagctttagaactgggtgttgaaggcagagaagaaaccaaaagaacaactaagccagggtttgtttgtttgtttatttaaggaaaaagacaaaatcatgagagtaaatgtttgcgatgctattagcaagatgagatctgaaaatggattctcacatttcaaaagtgcttctcctgaatccagaaaaataaaataaaatccaccgaagtcactcgtgcactgaccatcagagtatttgtttgctcgcgtcagggttttgtgtcgctgggttagctgaggatgaccttggactcctagtggtcctgccatcccctctcaagtgctaggatcataggtgtttgctgccatgcctggttacaggcttcgttctaaacaaaacacaacatgcttttcctcacttttacatttctgttatacatcagatctcacagtgtagtccaggctggcctagaacttgctatgtagatcaggttggctttggaccgagtgttaggattgaagactgtagtttttgttttgtcttccaataggtagaaaattcaaattgtctttttttttctttttaaacataatatcttaatttgttctttgagaagtttatgcatgtctgtaatgcattaatgatcgtatcaacccctatctccccttcaactcaactctccccgtccaagtcccccaagacacccccaaaacatcctctccagtatttcttctgtcagtcttgtagttcttaggaccatagttaacaatggagtgtcccctatccacctacattttattatgaagaacttcaaacatagagaaagttgaagagcttaccagccagtttgtgaagtagacagcaaccacccagagcagtggtcctcacctaacgctgggccctttaataaatttcttcctgtggtggtgacccccagctataaaacgatttccattgctactgtataactgtaattttgctactcttatgactcataatgtaaatatttctggaccgagaggtttgccagtggggtcgagcccctcaggttgagaaacactgaccttaagttgtattggcctcttctccaaatctcggttgaccaaggagatgggaaagagcatcagaggtagggcagtttctggttcccagcgcttctggagtgaagtgcctgggtgggcttgagtggtgactgttttcctcaggcttgtgaacttttagaacgtggagtaaagtttcagaatccctttggttcaccgagatggtaaacctgatcctggttccaaataagcaagcactgttcagcttcaattcctcttcagacgctgggctcctaggttctgatgggagcaacttggccagagtgtgcggagaggggagcttcagcatggagcagggcacacagtggcctgtgtttgggttatgcgacaactgagggccagccacttgctcagggtgctctaagccagtgacttgagagtggaggaaaatcttcctccatccttccagctgtgaggaagggtggggccaaagggcactgtcagagttgacagctgtggtccttcacttttgcacccatgagtctgagcagcttcaccttagctggcatcctgctgcgatctgtgaccttttgggaccaagtagagttagaagaaaatggtctggggaatttagaattgtctactgagccccttcagtcaccatcttgctcttgtactttgactgacaggcctttcctctcagcatctttaattgtcctgggctttctgtggaaattccacatttttgagtaacaatagcacctcttagctaggaaagaccgttttcttttgtttcacttcttcttctcctcctgtattaccttcctttccaaaacatttattctgttgtgtttcccaaccactgtgctgagaacaataggaattgagagtctagtggggagtttttataaactggaaactgaatttaaatgatggccgagttagtcaatacctaagcagtcctgaaacattctaactaggataactgtgaattgaacttgtgtgcatgcgtgtacatgacagggagtcttttttgacttaggtttgtttgtttgtttcctgagtgtagagttttgtgtagattgcagtaggtgaaacccagccagtctagttccttgtagctcctttgctacagagcagcccaggagagtattcctgatgctctctacctgggaccatgaatacagtctccttgactgttctgttctcttgagaggcccgctttgttgggaaaggccagcaacagatcagatggctaatgaatatgagtgagtatgcttattatatgcagactcccatcactttcaaaaatactattttatttatccttagaaacttccatacaatatatttggtatatatatttgatcatatctatccagtactactattatgacatttaaacaacaataacaacaacaacaaagatttatgctgggtctgctctgctagttgttgcttttaatcccggtgtttgggatgcctatgtagaaggatttctggtctacacagtgagctagcctgggctatatagtaagcaccagtcagctagagctacatagtaagctcctgtttcaaaagtattactttttaaaattttaattgtgtgtatgtgtgtgggtatgtgcatgtggctgcaggtgcctttagaggtcacaagagctggggttccaggtatctgtgagttgcccctgaagttaagagcagtaagcattcttaaccgctgaccctgatctccaggccccctgttgttacattttatatcagttttatgacatcacacaaagtcattctgttttattgtcatgttactggtgggactggaaatcaaacacaggaccttggcagggaaggcatgatgacaggaactgagatgcttggtctcagtgcactgtcaggaagaagagagtagacaggaagtgaggctagtttatagaccctcaagccttgcccctagtgttgcacttcttccagggaggctccacctaccaagtttggacagtcttccctgacagcgtcaccagctggggccaagtgctcaagcacatgagcctacagggatgttttcctgtcactgtcagtccacattggaaatactaagaaaaggaactagttgtggctatgcacttgggattggttgcagggttagggattggttgcagggttagggattgattgcagggttaggggtcagtggtttgattctcaggcaaagctggatagaagagaagatacaaacaactgtggtggcaagtctagccctgagtagatgctgtacgggatcatgatgacattcaaacaaacaacgaaccaaccaaacacacaaactgaaccaaacctacaacagagacgaactgggaaagatgcagtcagagcaggagcccacctccagatacaaagctctttctttctatgaaagcatctacactcaccaaatccttctcttcttgtctccctccatggctttattccacaccgtctcttgtctctgtctctgtctgtctgtctccatctctctctaacagactactatacatttattttatgagactttcttataggcatgccattctcctctttttaaaaaacatttttattgaacatgagtttcacatcatgtacctcagtttcactcatctccccatccttttgtatctgccctatgccctgcaacatcccccacaaaataaaaacacaataaaacaaaacaaaatataaaaaaaccctcttatctgagaagctgtagagcgttacagtgtgtcccacagtacgttcttttgcctacacatctctatttgcaaatgttcattgtgatgagtcattggtcttgtgcaaggtctctgacttgtaatactatatcaatgctggatcctcacagggactcttcttggatgccctgttgttgccctgtgtcatggagatccgacagctttg

SEQ ID NO: 164 - DNA, 6499 bp, Mus musculus
ttactgttggagcttgagggagagaaacaaacggaggagctgcggggaaggactggaagcttggggcttacttttcactccgggtatcggattttctttgcaaattgacatagaaggagaaggtctcaggagctatggggacctcccaccaggtctttctggtcctcagctgtctcctcacagggccgggcctcatctcctgccagctcttattaccctctatcctcccaaacgagaatgagaagattgtgcagctgaattcgtccttttctctgagatgcgttggggagagtgaagtgagctggcagcaccccatgtctgaagaagacgaccccaacgtggaaatcagaagtgaggagaacaacagtggcctctttgtcacagtgctggaagtggttaacgcctccgcagcccacaccggatggtacacttgctactacaaccacactcagacggatgagagtgagatcgaaggcaggcacatttacatctatgtaccagacccagacatggcctttgtgcctctcgggatgaccgattccttagtcatcgtggaagaggatgactctgccatcataccttgccgcaccacagatccggagactcaagtaaccttgcacaataacgggaggctggtgcctgcctcctatgacagcaggcagggcttcaacggaaccttcagcgtggggccttacatctgtgaggccaccgtcaaagggaggacgttcaagaccagcgagtttaatgtttatgccttgaaagcaacgtcagaactgaatctggagatggacgcacgccagactgtgtataaggcaggagaaacgatcgtggtgacctgtgccgtctttaacaacgaggtcgttgacctgcagtggacttaccctggagaagtgagaaacaaaggtatcaccatgctggaggagatcaaactcccatccatcaaactggtgtacactttgaccgtccccaaggccacggtgaaggacagtggagagtatgaatgtgctgcccgtcaggccactaaagaggtcaaggaaatgaagagagtcaccatttctgtccacgagaaaggcttcgtcgagattgagcccacctttggccagctggaagctgtcaacttgcacgaagtcagagagttcgtggtggaggtgcaggcctacccgacgcccaggatatcgtggctgaaggacaacttgactctgatagagaatctcaccgagatcaccactgatgtacagaagagtcaggaaacaaggtatcagagcaaattaaagctgatccgggctaaggaagaagacagtggccattacaccattatagttcaaaatgaggatgacgtgaagagttacacgtttgagctgtcaaccctagttcctgcatccattttggatctcgtagatgaccaccatggctctggcgggggacagactgtgaggtgtacagccgaaggcacccctcttccagaaatcgactggatgatctgcaagcatattaagaaatgtaataatgacacttcgtggacagttttggccagcaatgtctcaaatattatcacagagctccctcgccgtggcaggagtaccgtggagggacgagtgtccttcgccaaagtggaagagaccatcgcagttcgatgcctggcaaagaacaacctcagcgttgtggcccgtgagctgaagctggtggctcccactctgcgatctgaactcacagtggcggccgcagtgttggtgctgttggtgattgtcattgtctctctcatcgtcctggtggtcatttggaagcagaaaccacggtatgaaattcgctggagggttatcgagtcaatcagccccgatggacatgagtatatctatgtggaccccatgcagttgccttacgactccagatgggaattcccgagagatggcctcgtgcttggtcggattttgggatccggtgcatttgggaaagtggtcgaaggtacagcttatggattaagccggtcccaacctgtaatgaaggtggctgtgaagatgctcaaacccacagccaggtctagtgaaaagcaggctctcatgtctgagctgaagataatgactcacctggggccacatttgaacattgtgaacttgctgggagcctgcaccaagtcaggtcccatttacatcatcacagaatactgcttctatggggatttggtcaactacttgcataagaacagagatagcttcatgagccaacacccagagaagccgaagaaagacctggacatctttggattgaatcctgcagacgagagcacaagaagttatgtgattttgtcttttgaaaataacggcgactacatggacatgaagcaagctgataccacacagtatgtccccatgcttgaaaggaaagaggtttctaaatactctgacatccagagatcgctgtacgatcggccagcctcctacaagaagaaatccatgctagactcagaagtcaaaaacctcctttcggacgatgactccgagggtctgactttgctggatctattgagcttcacctatcaagttgctcgaggaatggaatttttggcttcgaaaaattgtgtccaccgggacctggctgcccgcaacgtcctcctggcgcaaggaaaaattgtgaagatctgtgattttggcctggccagagacatcatgcacgattccaactacgtgtcaaaaggcagtactttcctgcctgtgaagtggatggcacccgagagcatcttcgacaacctctacaccacgctgagtgacgtctggtcctatggcattctgctctgggaaatcttttcccttggtggcacaccctatcctggcatgatggtcgattctactttctacaataagatcaagagtggataccggatggccaaacctgaccatgccaccagtgaagtctatgagatcatggtgcagtgctggaacagtgagcccgagaagagaccctccttctaccacctcagcgagatagtggagaacctgttgccgggacaatacaagaagagttatgaaaagattcacctggacttcctaaagagtgaccatccggccgtggcacgcatgcgggtggactctgataatgcgtacatcggtgtcacttacaaaaatgaagaggataagctgaaggactgggaaggtggcctggacgaacagagactgagcgctgacagtggctacatcatccccctgccagacattgaccctgttccagaggaggaagacctgggcaagaggaacagacacagctcacagacttcggaagagagtgccatcgagacaggttccagtagttccaccttcatcaagagagaggacgagaccatcgaggacatcgacatgatggatgacattggtatagattcctcggacctggtggaggacagcttcctgtaactgacacgctccgggtatcatcttctccgggagcctcctcgggataaccttaagaaaaccacttcattgcaatgcaaaagttgagaagaggacttgggtgatgtggagagagaaagttcccgaggccgagggccttggtaagcctgtgtggatgactgggatacttggattgaactttatccgtgttgcctcttgcaacgcgtcagtagcatctcagcggcgtgtgcggtttggaaatggatggacaagagagtgactggccacagaagacgggctttgtgtttccagggcatgggtgagagtcccacacgcgccaacttgtactgcagacaactccagcattgtaattatgtaaataactcttaaccgaggatgggtttagatctgtgttaactctcctctccggacctctgaagagaccactcagtccacccgtgtgcttccttccttcttggaatccggtaccagctgctgttgaattttctcatgaagtacatgcaaaaccactttgaactttggaaggtactggaaccgtcgtgttttactgtcttgtaagtgttaaagaggcaaaaagataaaaactaaccaaccgtgagtagtaggtttgggtcttttagggcacccaagaattcctctgtatcttgtaatctgtacttataacactactactgtttaacaagaatgctaaatatgtaatccgtaacatgatttctttacagagaaagcacaattaaaacaaaacccttactaagaaggtgacaagtttggcagtttttgacatttatattaagtaacacgtttctcaataaagtataataggtttagcggattaaagttagcaaacactagagagcagagtgtaagtagttatccagaaagtcaaacctttttgttttgttctaagcagtctccctaatccaaggcactaggaacagttaatgacctctgaagtactgggataagcaaagcagaaacccggtgggtgtcctaagtgttctcagtagaaaggcgtacgcctgagcccagtgtgactcctcacgctgtgtgcgaccttctggaagagactcattcacaaaaaggactcagatgggcagaatgtccatcagatgggactcagatgtctctcctgaccagtgatggcttggatggatcccgcccatacctacttttaaagtctgtgacttttaaggatgcttcaacatcagcaccttactttttctctcttgtctcagacgagaaagaactgcaaaccctgagaccacaatggtgctgttgaatgaaggctatgtgggcatcagcttggctcttcccttcccaccattaactacagctacagttactagcctcaatggtgtcagacctttgccccagagatttggaattacaaggtctgacgggagcaggaagctatatatatgaactgcctggtgctcttgaatagtcagtgttcagaaacactggcttgggttactgttgggggagggcaactttgaaatttggaacggggctagaagtcaaccatgcaggaaggctactgtttaagttcttggcttcatgtcaataacatgtcaatgccacgtatgcagctattcctacccttgatttaagtttccaggcttggctgaggctgagaaagcaaacatcttgacttgggaacatcttcccattctagtcaacgtgggtaccacttccccctggatgggagaacctgagcttgctcgcctcaaagtgtgtccgggaatgatgcaagtctgtgtgtcaggtctttgtgcaaccagctccatattcggtggagaagattaaaaaaaaagttttctgaatttggggcctttaggtggtaggctatcaggagcatccgaactgtcaaagtggttagtgtgagttcattggcattctctgccatgtgtctaattgctgactctgtatgaatgaaacatgggctatgattactgcaatcactgtattgcttctagcaggtgacgctttggaaggcacagaagcaataacaaggtacttgactacctactggcataatctcaatgcaaaccccaactttcccttttcacagtaagtgtgaagactgagccagattggccaattgaaaaacaaaaacctgactagagtctttcgagccaattagacttgaactacatccgtctttctagactcgtggctggagcagtctgtttaccactcatttgcacagcctctgtttgttgcttctttttattctgatgtcgctttgggccttgcatgacaccatgaagttggatgatacttctcagaccagcagtttcccatctttagctgtacccacctctgagattcaatgggaatacgttcacttttgttttttgagacagggtctttctacgcagccctggctgccctggaactcactgtgtaaaccaggctagccttgaactctcagagatccactgtctctgtacccccagtgctgggattacaggcatgcaccaccacactcagcagggatacatttttatttttaaacagtgttttgactgtatcctgatttgttttctttctggcctcctgcagagtccctggaagaaaatttaccaatctttcctgctttctatttttatgatgacaatcaaagcttgcccgaggaacacaatttgtgacttttaaaaaaatgatcaatgatgtccttaaaaaaatgtggtctgccaacctgtacaaaatggtcctatatttgtgaagagggacgtaagataaaacgatgttatacatcgatatgtatatatctgttgctatgtagacttggagaatactgccaaaatgtgtatgacaagctgtatcactgcctttgtttatattttttttaactgtgatattccccacaggcacgttaactgttgcacttttgaatgtccaaaatttatattttagaagtaataaagagaaaaatactgacatgttcccaacatggtggtgtggtaagtgtgtgagagcgacttactccataggaagggtcttccaatacaagatggcttccagatacccctgttcatgttttgttttaaaaagtgtaaatggagatctttatatttcaataaatgatttattat

SEQ ID NO: 165 - protein, 1096 aa, Mus musculus
KEKVSGAMGTSHQVFLVLSCLLTGPGLISCQLLLPSILPNENEKIVQLNSSFSLRCVGESEVSWQHPMSEEDDPNVEIRSEENNSGLFVTVLEVVNASAAHTGWYTCYYNHTQTDESEIEGRHIYIYVPDPDMAFVPLGMTDSLVIVEEDDSAIIPCRTTDPETQVTLHNNGRLVPASYDSRQGFNGTFSVGPYICEATVKGRTFKTSEFNVYALKATSELNLEMDARQTVYKAGETIVVTCAVFNNEVVDLQWTYPGEVRNKGITMLEEIKLPSIKLVYTLTVPKATVKDSGEYECAARQATKEVKEMKRVTISVHEKGFVEIEPTFGQLEAVNLHEVREFVVEVQAYPTPRISWLKDNLTLIENLTEITTDVQKSQETRYQSKLKLIRAKEEDSGHYTIIVQNEDDVKSYTFELSTLVPASILDLVDDHHGSGGGQTVRCTAEGTPLPEIDWMICKHIKKCNNDTSWTVLASNVSNIITELPRRGRSTVEGRVSFAKVEETIAVRCLAKNNLSVVARELKLVAPTLRSELTVAAAVLVLLVIVIVSLIVLVVIWKQKPRYEIRWRVIESISPDGHEYIYVDPMQLPYDSRWEFPRDGLVLGRILGSGAFGKVVEGTAYGLSRSQPVMKVAVKMLKPTARSSEKQALMSELKIMTHLGPHLNIVNLLGACTKSGPIYIITEYCFYGDLVNYLHKNRDSFMSQHPEKPKKDLDIFGLNPADESTRSYVILSFENNGDYMDMKQADTTQYVPMLERKEVSKYSDIQRSLYDRPASYKKKSMLDSEVKNLLSDDDSEGLTLLDLLSFTYQVARGMEFLASKNCVHRDLAARNVLLAQGKIVKICDFGLARDIMHDSNYVSKGSTFLPVKWMAPESIFDNLYTTLSDVWSYGILLWEIFSLGGTPYPGMMVDSTFYNKIKSGYRMAKPDHATSEVYEIMVQCWNSEPEKRPSFYHLSEIVENLLPGQYKKSYEKIHLDFLKSDHPAVARMRVDSDNAYIGVTYKNEEDKLKDWEGGLDEQRLSADSGYIIPLPDIDPVPEEEDLGKRNRHSSQTSEESAIETGSSSSTFIKREDETIEDIDMMDDIGIDSSDLVEDSFL

SEQ ID NO: 166 - DNA, 59475 bp, Homo sapiens
  misc_feature (1)...(59475): n = A,T,C or G
caaaagcaatggcaacaaaagccaaaattgacaaatgggatctaattaaactaaagagcttctgcacagtgaaagaaactaccatcagagtgaataggcaacctacaaaatgggagaaaatttttgcaacctactcatctgacaaagggctaatatccagactctacaatgaactttaacaaatttacaggaaaaaaacaaacaaccccatcaaaaagtgggcaaaggacatgaacagacacttctcaaaagaagacatttaagcagccaaaaaaacacatgaaaaaatgctcaccatcactggccatcagagaaatgcaaatcaaaaccacaatgagatagcatctcacaccagttagaatggcaatcattaaaaagtcaggaaacaacaggtgctggagaggatgtggagaaataggaacacttttacactgttggtgtaaaagtgttggtgggactgtaaactagttcaacccttgtgggactgtaaactatttggttggtgggactgtaaactagttcaacccttgtggaagtcagtgtggtgattcctcagggatctagaactagaaataccatttgacccagcaatcccattactgggtatatacccgaaggattataaatcatgctgctataaagacacatgcacacgtatgtttattgcggcactattcacaatagcaaagacttggaaccaacccaaatatccaacgatgatagactggattaagaaaatgtggcacatatacaccatggaatagtatgcagccataaaaaatgatgagttcaggtcctttgtagggacatggatgaaattggaaatcatcattctcagtaaactatcgcaagaagaaaaaaccaaatgccgcatattctcactcataggtgggaattgaacaatgagaacaacacggacacaggaaggggaacatcacactctggggactgttgtggggtgggggtagtggggagggatacctttaggagatatacctcgtgctaaatgacgagttaatgggtgcagcacaccagcatggcacatgtatacatatgtaactaacctgcacattgtgcgcatgtaccctaaaacttaaagtataataataataaaataaaaaaatttttaaaaaataaagttaaagggatattattattattatttttgtaagttaaacattaggattaaaaagcacaacagagttttctagagcactgatctactctgtaacagaaaattgtaaagggtttaaaaggtttatgagaatcttaccttatggtcaaactggttaagattgggaagatttgtctataaagttttattaagaattgggtttgacattaatactacactaatgcaaacgtgaaatgtggctttctctcttgaataagattttcatgtattattacaagataatgaaagatttttatttgctttttaaataaactataggaaaaataagggagagaaaagtgacagatcatttggaaacccaagtctcccctatatcaatgagtaaaagtttttacctttttgaaatctttgagttatcattttggctaaataaatgctttatggtgacctgggattctattttgtaatatcaactgtttaaaccttttgtatttgacaaacgttccaaactgaaattctaatgtaagtctttttctgacctgattagtccttctagatattaggtcccctaaagtccaaaagtgacatatttggcttattagatatattaaaatcatacaggaagcactttcaaatataaaatgctatttggctttctttggactatacttatataaatgtgttattggtatatgttccaaaattatgcaaaactcctataattctgatatgacttagtgtacattatcagtcataattatagttcttatgttacattattgtgtgctacagagttaaccaaatttctttgtcaattgcatctttaatcagctgtcctaagacttttgtcacccacagacaattgtcttgttttaatccttttcaaaaggtggtttataatcagctataggactctgatgggtactctaaaatgcaagcctctgataactttgaaaattgtgccattggctgggcatgatggctcacaactgtaatcccagcactttgggaggctgaggcaggcagatcacgtggggtcaggagttcaagactagcttggccagcatggtgaaatgccatctctactaaaaatacaaaaatcagtcaggcatggtggcatgcacctgtaatcccagttactcgggaggctgaggcaggagaatcacttgaacctgggaggcagaggttgcagtgagctgagatcgcaccattgcattccagcctgggcaacaagagggaaactccgtctcaaaaaaaaaaaaaaaaaaaaattgaaaaagaatattgtgccattgaaacagaaaagaaaacacaaataaacttccaggattctcatagaaacttaatatattcataaggaatgtggcccaatatcaggcaaaacaagagttaacagcatggactaaactaataaaagaccaaaacaatcttttaatgactttttgcttaaaacattgcatatcctttctgttttgcttttcagagtcaagaaaacttttcctttggaaagtatttactgcttttaacaattgaaaaaagtatactactatggacaaaatttggagcatatgtctttctttttacctgatttctccagaatttgaaaactatttgggagtattcttaactaatagcaatatagttatttgcctaagtgcagtaagaatcttttcttttgtaataggacacaattaaagaaactgcttattttatgaaggctttgactagaatggtgtgctttcagatacaaacagactgctttaagggatcaaagttgacttatagagccaataaaagccactatggaaaactggccttattctttgtctatgcagtctctgtatggggttcctgacctgtggtaagtgaagaatgtcactttctgacaggcccaggagccccaagttatcttgggacatcaagaagaaaggaatgcacccaacttatacaggtatttgcaggcacagataaatctgtggctggctcaaggctttaagaagcctaatgtgagattctttttaaattaaatttccatcgaaaccaattttaacaagagcctatgtggcaaataattatttttgctgcactttatacaaataatcaggccaaatttcataagattaaaactttatggcaaacaaatttgtcccactatgatttgtctttggtaaaaatggaagctagagagagaatttgtttcaaaaactatgatacaccagttattagattctagtctcgtctgttgtttttgagtttcttctgcaatttaggcagaccctgcttattcctgagaatcaaccagtgatctatggctgttgctcagaagaaataagagggatggctaacgtaaagatctggattagtattctaattctaggcatgtattagaattggctagtgaccccatatcagcttggttttaacaattacccagttcatggaaagccttcttatttagtttacttgggataattgtgctgattttgttttactgttgtggaatatattgctgttgtcctctttgtgtaggaatgcaggaaaagcttacttaacattttcttaaattgaacacttattaatcttccagatttcaccttttgtcagaactcagagttatgatttgtcctcactgtactgacaacaggctctggtagggtgcagaggtcctggtaaacacaccctctgctggaaaacagggagaagtttccatcagtgtaagcctgcacttgggttgtctgggctgaagttaggagactgagtagaacatttgctgcagaaaaaaaagaagatgtgtaattttcacagttagaattaacttaggagagctgaaattaactgagcctcggaaatctgaatcttgaagtcaccagtggcttttgggactgtgagagagtctcttgtggtctttaatcatgtgagggtggggtgaaattcaatattcagtggttctgcaatgggatgcactgtgcaattggtgattgagaagccaactctctggctttaggagaagaatgtcttgctgttagtccttctggaaatagagccttgcattgcctactgtctgtttacactacctttgcacattgcctttggttatagagtcatgtccaatggctctttacttctgtttgcagggcaggagatggcaccctgttaaagagaaaggatagtagctgcaaagtcatttgtttctctgtttctgtgactgtatatattggctcatctttgaatggtctttatagccacaccaggctggaggtaacagggtcatgggagtggactgctggtgtgggctaaatcagagttcagatccatgtctccaagaggtaggaagtgcagggcaagttatgtggcttctggggcatccctcactttcttagttaaagagaagttgaagtaatcattctgaaatattatgggagtctgcagaaaaagtaatgaaaaccaaagcactttccattaatctccataatttagtccttacgataatgtcacagggcaagcaaccaatcagaccttactagtcgtgcttcctagaagagactgaggttcagagatttggacagagtgtcagatatgggatcagtggctagtccaatgtgatttccatcctttcttctgagagaaagcataagaaggctaagaggatgggggtaaagcacaagtcacctgcctgagagtcaacagagcaggggtctctttctcagtttgtttctctaagttatggcaaaagctttttgagctgtgattattgagaatgggggctgaagttcaacacatagttggcatgagagaagtaattatgattgaagaaatctagatgaaatccattgttcttttctgtaaaggggttgttatccctgattctttttttcttttttcttttttagatggagccttgctctgttgcccaggctggagtgcagtggtgtgatcttggctcactgcaacctctgcctcctgggttcaagtgattctcatgcctcagcctttccagtagctggaactacaggagtgtgccaccatgcccggctaatgtttttatttttagtagaggtggagtttcaccatgttggccaggctggtcttgaactcctgacctcaagtgattcacccaccttggcctcccaaagtgctggaattacaggagtgagccattgtgcctggcctgttctcactgattcttatagtgccatgtttctcagaatttgtggcttcaattacttatatttgtgcacctgacttttaggtgagctccagaatagcattactaattaagaatgagcatttagagtagaaaaagtgacaggaacagcaagactcacttccagaaagcctcactacaggtctaataggtgaggaaagtccccatctttcccatttttcttcattacctccctgtggggcaagcactgccattatgcatgagtaaactgtctgagttatagataagtaatgacatgaaacttcacaaacaggcctagatttctacccagggaaccgctgttatcagagaagggagtttggaatcttaagcaacaaacacatgttgattctcagtatttgcctcctgatggcttgctcagagagcctgttttcattgcccactttatatgtcagtaaataatcttccctggcagtgggtccaccatgtctggatgcacacagggaaatctggtggggtctggccagtgaaaaacactcctcaggttttgcaggaaaagcagtgaacccttcttttaagctcgagaatgctttaaagatgcatcattggcaagccttgccaaagaaatacgggatctaaatgtgataaaagccacgacgacatcaagctggctctggaggtctcctttgaagtttgctgagtggattgtcagtgggaggctgatatttacatgtagaagcacacaagtgttactgctaattgtggtaaatcaggctggccagcctggctctggatcccactgtgcctaacaccagccctgcatcccaggcacatgccgggctcctcagaagcgatcagccagccagcattgtgtgaattgcatttgggttcacagcactgtaattgtccttctcctgctatgaggagcagagagggaaaagggaagggagggttgtgtaatttgccctaggaaattgtgggggagggacaggcactgggccgggtggggggcggtgcgacatggctaaaacactgaccttcccttgagagagaccatatggtgaagtggagagggcacagcttttgcatcacacaggccttgtattagaattttggctctgacaccagctgtgtgaccttgggtcatttgcgaaacctctctgagcctcaactgccccttcttaaaatcagctctaagtaaccacagggttattcttcagaaacacagcatgcacatgcaaactttggcttagtaaataatgatttctttttgttctatctactccacctccctttcccattagaagcttgctacctttcactctgtgttttcttcctctcccattttcctggtggcattcaataaagcagaattctgatttctgcaatgtaggccaccttagagcaaaatacatgatcaggcaccaccaaattaggctattatctactggatcctgtttaaccaacccaaacccaactcaggctaaatacaggaatacaagaaaacgctgaatttctcccctttctttttttttttttttttgagacagagtcttgctctgtcacccaggctggagtgcagtggcgcgatcttggctcactgcaagctccacctcctgggttcacgccattctcctgcctcagcctcctgagtagcggggactacaggtgcctgccaccacgcccggctaattttttgtatttttagtagagacagggtttcaccgtgttagccaggatggtctccatctcctgatctcatgatctgcccgcctcagcctcccaaagtgctgggattacaggcgtgagccactgcgcccttccctccttttttttttaaaacaacaacaacaacaacaacaaacagtttattcagtaattatgtatacgtattttagcttccaaagtcagtgatggaacaaattgagtcctattaggcccactccattgcatgagttagcatcagaggaggtcaaactagagtgacttcatcttgaatatgggctaggtaagaagaggatgaggcctgctgggctgcattcccaggaggttaggcatttgtagtcacaggatgagataggagttgggtaggaatggtttcataaagaccacaggatgcaagctgggtgtggtgccttatgcctgtaatcccagtactttgggaggccaacgcaggaggattgcttaatcctaggagttcaagaccagcttgggcaacatagtgagacctcatctctacagataatttttattttattttattttatttttttgtgatggagtcttgctctgccgcccaggctggcgtgcagtggcatgaccttggctcactgcaacttctacctcaggggttcaagcgattctcctgtactcagcctacctgagtagctggaattagaggcgcacaccaccacgcctggctaattttttgtgtttttannnnnnnnnnnnnnnnnnnnnnnnnnnnnnnnnnnnnnnnnnnnnnnnnnnnnnnnnnnnnnnnnnnnnnnnnnnnnnnnnnnnnnnnnnnnnnnnnnnnnnnnnnnnnnnnnnnnnnnnnnnnnnnnnnnnnnnnnnnnnnnnnnnnnnnnnnnnnnnnnnnnnnnnnnnnnnnnnnnnnnnnnnnnnnnnnnnnnnnnnnnnnnnnnnnnnnnnnnnnnnnnnnnnnnnnnnnnnnnnnnnnnnnnnnnnnnnnnnnnnnnnnnnnnnnnnnnnnnnnnnnnnnnnnnnnnnnnnnnnnnnnnnnnnnnnnnnnnnnnnnnnnnnnnnnnnnnnnnnnnnnnnnnnnnnnnnnnnnnnnnnnnnnnnnnnnnnnnnnnnnnnnnnnnnnnnnnnnnnnnnnnnnnnnnnnnnnnnnnnnnnnnnnnnnnnnnnnnnnnnnnnnnnnnnnnnnnnnnnnnnnnnnnnnnnnnnnnnnnnnnnnnnnnnnnnnnnnnnnnnnnnnnnnnnnnnnnnnnnnnnnnnnnnnnnnnnnnnnnnnnnnnnnnnnnnnnnnnnnnnnnnnnnnnnnnnnnnnnnnnnnnnnnnnnnnnnnnnnnnnnnnnnnnnnnnnnnnnnnnnnnnnnnnnnnnnnnnnnnnnnnnnnnnnnnnnnnnnnnnnnnnnnnnnnnnnnnnnnnnnnnnnnnnnnnnnnnnnnnnnnnnnnnnnnnnnnnnnnnnnnnnnnnnnnnnnnnnnnnnnnnnnnnnnnnnnnnnnnnnnnnnnnnnnnnnnnnnnnnnnnnnnnnnnnnnnnnnnnnnnnnnnnnnnnnnnnnnnnnnnnnnnnnnnnnnnnnnnnnnnnnnnnnnnnnnnnnnnnnnnnnnnnnnnnnnnnnnnnnnnnnnnnnnnnnnnnnnnnnnnnnnnnnnnnnnnnnnnnnnnnnnnnnnnnnnnnnnnnnnnnnnnnnnnnnnnnnnnnnnnnnnnnnnnnnnnnnnnnnnnnnnnnnnnnnnnnnnnnnnnnnnnnnnnnnnnnnnnnnnnnnnnnnnnnnnnnnnnnnnnnnnnnnnnnnnnnnnnnnnnnnnnnnnnnnnnnnnnnnnnnnnnnnnnnnnnnnnnnnnnnnnnnnnnnnnnnnnnnnnnnntacttactggccctagcacctacaagttcattcacagttccttctcactgacttcaccagtgaccactatcagtgacttcaagggagaaatgaggggggagataaaataaagtgaatggggaagagataaagaagagaggtcttttcacagtttgccagaatagtcccttcagtggttttaccccagggcaacaggagcccccttttagtttctttctcttttaattttcttttcccttcccactttttgcccactttttgccttatttgtgtctgactcaatttccgtctctttctctacttcttcattcccagatttggctgtagaaaattagaaagttcttgaacttggtttgcacgggtgcttttactttaacatgaaaatgaatgatcagcctccttctaatttcatcctagagtctactgcatccctcctaccccctgcacaggaatttagtcacacttatctctcccactttctctcccttcttcactttctctattgctcctcctttcatgcttgtacctgcttttccatgccctgtttagcctggcttgggatccagcaggttctccaagggttcctgcaagaaccccggctgggtgcccaggtctgagcctggtatgtgcctcagtatcacaaaggcctcctgtaaatgacacacattgttggaagtttcagaaattctaggtcaaaatggcactgaaatattaaggtatttaccccaacccaagcaacttttctaaaagttgtagagagtgtgacctctttattaattgaaacgtgaaaatcagctctagtttggaagctgagaaaaaatatatatatatgtatttatttctttgttgtttgaattcttaatataaatggtttaaaggaccattgaaaactgcatgcaatcacagaaggttttggcttcaggcagctcccgccatgatcttggggccccattgattctttcatctttcaggcgtcttactgtttgaaccttgaattttaacctgggacatgtttgactaaaatgatgctgttaatattttctgttgtgcaaaacacaaagagaactaggctccagggttgtttctatttgctaatgctgtttctgttgacttttgacttttctagtttcccagagctatggggacttcccatccggcgttcctggtcttaggctgtcttctcacaggtacggagcccagtcctctctgagttccttgtttgggtgtcttgtttttttaagctttgtgctgcatgggtttattaccagtactctgcatacacagtccaaaagagtgaaaagaaatagaaaactataggacgttatccagaatgaccacaaaccttcagttccctttgctgtattgcacttactccatttcaaaaggaatgctctccagtggcagttttagtacatatataatgttggcattgaaatgttgttagtaataatgtctaaatttacttactactctcttccttttcctaggacaaggcttctattagagctggattagataaattcaggaatggtcagctgtgggaggtggcacatctgttgtcccagccccttgagcagctgaggtgggatgatcccttaaggccaggagttcaaggttgcagtgcactgtgattatgcctgtgactagccaccacactccagcaacatagcaagacctcatttaaaaaaaatgttcaaaggaaataaataatagaaaattcttgcccaagaaatcatacttgtcttaaatcataactctcttgaggaaagatgcttacattgcttctaaatctcagagtcacctttatcttctctaggaatcaaattgatagatgaatgtttggctcttggaaaatcttaaaaactttcccaccaaaaggatcattggggtaatttgttgaagtgtgtattggactgtcttagttttcctccagatatttatgcactgcagatgttcgccatgaaaccagtgctcttctattctgaggagttagctcagcccgttagtgtctttgtcttacccatttggatatggtagaattgagcaagaccagagattcaacagttctaagctccactaagtataccccatctacagagtaataggtgatccagatgtacttacaaatcctatcttaacaagctttaggaattatagtggtcatatattgaagttgggtgggagtctcacaccaggttccaagggagattacaaatcactaattaataattaagtcataatatctcttctatcagtctcgggtttcttgttttctaagttctgtgctccatgggtttattatctgtactctgcttacacagtccaaaagagtgaaaagaaatagaaaactacaggacgttatccagaatgaccacaaaccttcagttcctttgctgcattgcacttactctattgcaaaaggagtaagtgcaatttcagtctaaataagcgagactgaaatttgagcttcgaagatgaacttagagttttcactcttgggttttacttaccaattgtgaattaaaatccgtatcatctggcaccactgcactccagcctgggtgacagagcaagactccatctcataaaaataaagaaataaataaacaaataaatccacatcatcctgctttggccctggaagtcatgagggagagacggcatgcccgagggctataagaaatggaagatgtggaattcttgagcacagatgtgctttgtgttttcttcagtctgtgtccttgcctccattcttattccatgtgggttttttttttttttttttttttttttttgagacagggtctctcgctctattgcccaggttggagtgcaaaggctgactgcaacctcaatcccctgggctccagtgatcctcccacctcagcctccaaagtagctaggactacaggtgtacaccagcacacctggctaatttttttatttttttatttttgggggagaccaggtctcactacgttgcccaggctggtctcgaactcctgagctcaagcgatcctcccacttccacctaacaaagtgctgggattatagacatgagcctttgcgccccagcctcttttttttttaactaaaggaaacctttgcagtgattgtgaaccataaagaacccatatgtgcttgagcccgtgccatcttgggatatttttatggttacacataagagtctgaaatatggaattggaatcagacatcctctgtctatttgagtgtttggaggggtgaatctagtggggcttggtggagctatttggaacatttgctgctctcagcagatgcagtggctgttataatgggggagctttcatgggcatccaggctaacggatttttgtgtagaaatggtcattgttcatctaagctgctactgttgcttctctcagttgtcgggatgagactgtcctttctgactgcatcctattcagagcgtgcttccttttgcagggctgagcctaatcctctgccagctttcattaccctctatccttccaaatgaaaatgaaaaggttgtgcagctgaattcatccttttctctgagatgctttggggagagtgaagtgagctggcagtaccccatgtctgaagaagagagctccgatgtggaaatcagaaatgaagaaaacaacagcggcctttttgtgacggtcttggaagtgagcagtgcctcggcggcccacacagggttgtacacttgctattacaaccacactcagacagaagagaatgagcttgaaggcaggcacatttacatctatgtgccaggtgagttggctgggtctccaggaccaagcttcttctcttcctgtctctcctgttaaatgtactaaggttttaaacatatatataaataattaatatttattgcgggaagtttgaaaaatgtaagcgaacacacacaaaaatcatttgtaatattatcaagaaatattcattgttagcatttcagagctgtattaagtttggaaagtcatctttgttatgacatgtcctgtattgatactgtataaacaatctgaaatatactcatctctattcagttcattcaagttgcacacatactcacagtgtgtccagcactgggctaagtgttgagtacacaaaaattaataggtaagccctgtcttggagttgctgatagttcattataatatcttccaaataaacactcgatttttcagattcactatcaacatacatttattcttggagagttggaaggaattttctttttccttttaaaaaagttacatatatatatatatatatatatatatatatatattttttttttttttggtaacagggtctcactctgttgcccaggctggaatgcagtggcatgatcatcatagcttactgcaatctcaactcccttggttcaagcgattctcccacttcagcctccccagtagctgggattacaggcatgcaccaccacgcccagctaatttttatattagttgagacgggggtttcaccatattgaccaggctggtcttgaactcctgaccttaagtgatctgcctgcttcggcctcccaaaatgctgggattacaggcgtgagccactgtgccctaatttttatttttatttttgtagagatagggtttcactgtgttgcccaggctggtctcaaactcctgggctcaagtgatccacagccacctcagcctcccaaagttctgggattacaggcacgagccactgggcctggcctactcctgcattttaattaaaaggacaaaagggtcgagcacaagtgatggcaatttcagtatgcagttgggtaaattaaaaaggactatggctagaatccttggttttagaacaaaacctaaactgtttatgattcttgccatccttgctgttttggcataggtgtgtcttcctacctttctgccttttctttttcagtttttaatgggctcctcttcctaccctctataactacgagtgtccccagggatctagaccctctttactttttcatgatactcttattcatatgaaccttccttcttaacaattaaaaaaaaccaaaaactttgttttgaaaagggaaggtatttagaatgtcactccaacttcattcacacttagattccttcaggaaaatcctctaggtgtggagggattttcccctgctgtgaagagaatggtaggaacgtgaatgtgttaaaggcacacgagtccctgaagttttaatccgtgtaagattgtccaaaaattcttcttgttccagcacagatgccatccaagtagcccctgcatcgctgtctgactgagatctttttattcgcaatcatgcagacgtaggggccctttctgcagctgatgtttgagactgttagaacttcttaccaccgtagcttaagtagctgtttttcttttggaaaggaaattctcaggctccttctccttctttaaattttatgtatttctcaaaggattactttttaataaacagatttctatgctatttttgaatcatactgactataggtggtaagagtttttaaaagcatttcataataaaactcgaaatattttttcctgttttaaacagagttggactgtattattttattgttaatttttgtttttagttgtttaaattttgatttagattcctggttagtatttatttatttatttgtagagacagggtctctctatgttgcccaggctggtctcaaactcctgaacacaagcaaccctcccaccttggcttcccaaagtgctgggattacaggcatgagccacaactcctgtccagtattgatatttatcatcagtattatccatcaggagacaggcaatttggtattattcatacttaaaaatcactttgtagctgtcatgataactaatgccagtggggcaattcttctggatatatgtgtaaaggtgaacttcatacctaatatcaataatgccagtgggatagtttttctggatttatgtgtaaaggtgaaattaatgtctaatagagtcttcattcttttttaaaccacagacccagatgtagcctttgtacctctaggaatgacggattatttagtcatcgtggaggatgatgattctgccattataccttgtcgcacaactgatcccgagactcctgtaaccttacacaacagtgagggggtggtacctgcctcctacgacagcagacagggctttaatgggaccttcactgtagggccctatatctgtgaggccaccgtcaaaggaaagaagttccagaccatcccatttaatgtttatgctttaaaaggtacttgtatcatctccttccttctttaaataagagtaacaggcaaaatcataaggtgcgtgtaggatttttttttttttttaaatcatcatcactggtgatcctaaattctgatttggggatttaggaccccagctaatacaatgtctgtggctataataataagcttaaaattactaaaggccaaagcttgattacccatgcaagatttcatgtttcatcagttgacttcaaaatactgtaaggaattcttttcttacataagcctcttactttcattcacattcctgactatggcggccctaaaaacaaacatacacccagggggttagatgcctagattaattttagtaacttaagaaaagtgatttgaagaaagtagtttagacttcaaccctttgatgtccacagttagtacgcttggggaagtataatacatgctgaggtcaacagatatttcctgaacactatattacatggaggaatgggtagcagcaagagtacactgttttaaaatcagagcacagctaattttgtgccaggcactgtgctaggttctgggaaagtactgagaataactgaggagcagagtggaagagaagaagagaagaaacaattggatagaaacaaagtgtctagagcagtgtggatcagcaaatgttggttgattaaatgaataaatttattagtcaaggagattgtggacgagtataaccataactaacccactgctgaggaatgcggtgttctgtttgattggaatttatttttattgttattattttgtaattctgtattataactatatgcctaattgttgtacaccatctcacaatcaagccttgtgagattttccaaattttatcttgatcaaactggtttgcaaattatttttcagggttttcttaaaaaaaaaaaaaaaaacccaaactttataagatcctggctatcctgtggatttttaggcccttgtatttgttcttttttatagcaacatcagagctggatctagaaatggaagctcttaaaaccgtgtataagtcaggggaaacgattgtggtcacctgtgctgtttttaacaatgaggtggttgaccttcaatggacttaccctggagaagtggtaggtaccctcaaaacgtgcaatggcttggagcagagcaacagggctcagaagacctgcatttgagctcggtctgtcactgatgggcacatcactgagtttctctagaccttagcttcccacctctgggatgaacacatttgattaaatggcctttaggactccttgatcaatgggagagtttgaaatgatagttcctggaccaggcccttcagaatacataaagagtgtgccgtaagccttctttttcagaagtcagacagaaataggaaggttctctggctacaagatatcaaccaaaaaattagaagagcaaaaaaaccactggattttactattgcggagacagtgattgattctcatcgtcttggcttctgtgccctgaggtttgattcatctgatagtgttgattgcccgcaccccttcctcttctgccttgttggcacccaggacaatgtgtcttcctgttccacctcctatgtgcctgacctttgcatggctcaccttcagtgaaccgttatgatgtaatcattcagcaaaggtttaatgaagtttgctcaatcccaagcactgtaccagaagctggttcagtattgcaggaagaagggaggaggggagatggaagtggggaaggggagccaccatgctgcctcttggtcactggagatttacagagtctcagtcattctaatgcattgtcactaagtgtgtaagacagccatgtgtaagaggctatgaatgcccaaatgcaggaatgactaatattcttatggagaacaaaaacgagatatatatatttcttgcctccactcctgacttgtaaatttctgctccctgttcttttaggcatttgacagctttctgtccttctatccattgatctccctccttttatccgtttctctctcccatgcatttgccgctgcttttcatttgtcctggggcatctgataggaagttgggcattttcactattgcctcacaaacttcacacagtgaagggacatttacagtccaacaaatgtacatcttccctgaaatatgaagtgatttggttcttctgttcatacttgattgactttaatccttaacacataaacactgctttctatttataggagacagcaatttttttttccaaaccgaagtacatgctatttggcttacaaatatataatcaaagtattgtttcatacagtatgttttttccgattataaaagtaatgcaggtttattgcagaaactttgtaaaatatggagagacaaaggaaaggctacttcccagagcatcactgtttatattttagggagataaagcttttatttttcatttgtatttctttcttttttttttcttttttcttttttttttttgttgtggagatgaggatctcactacattgcccaggctggtctcaaactcctgggcttaagtgatcctcccaccttggcctttcaaagtgttgggattgattacacatgtgagcctctgagcttgactgagataaagctcttaagtatttcttatccatagataaacattgaataataggtgttattctttaaatggtaatttattacattctttatccttcagcagtatagcacaaacaccttatatgtgtcattaactgtccttttaaaaaatgggctgggtgtggtggctcatgcctgtaatcccagtactttgggaggctgaggcaggagagtcacttgaggccaggagtttgagatcagcctgggcaatgtatcaagactccgtctctacaaaaatttttaaaaattagccaggtgtggtggcatgagcctgtagccccagctactcaggagactgaggtgggaggatcacttgaacccaggaggttggggctgcagtgagccatgattgtgccactgcactccagcctgggcagcagagtgagattctgtctctaaaaaaattaaaaacaaaataaaaaatctcatgattttctaagcagctagcttttattctttaggttttatcttttagagcagttttaggtttacagcaaaattgagaggtacagagatttcccatgtgttccctacacccacacatgtgtagcctcccaccttgtcaacatccctaccatccatttgttataactgctgaacctccattgacacatccatatcatccagagtccatagtttatcttagagttcactcctaggagcgagctttttaaaagtcggttttcttccccttttgctgtagaaaggcaaaggcatcacaatgctggaagaaatcaaagtcccatccatcaaattggtgtacactttgacggtccccgaggccacggtgaaagacagtggagattacgaatgtgctgcccgccaggctaccagggaggtcaaagaaatgaagaaagtcactatttctgtccatggtacattccgctttctaaaatgtcagttgtccatgctgctcgggatccatatgtggtaatcattatttaatggaaactcttccctgtacagagaaaggtttcattgaaatcaaacccaccttcagccagttggaagctgtcaacctgcatgaagtcaaacattttgttgtagaggtgcgggcctacccacctcccaggatatcctggctgaaaaacaatctgactctgattgaaaatctcactgagatcaccactgatgtggaaaagattcaggaaataaggtaaagaaactctctgcccaagtatgcctttttttagtgtgcatcagaggcggactgaggtttgtgtgtgtcttacaacccagacccaaagtcagtctagaaaatgtaacaatctgagttaagagatgcttgaaatcacatccctttaatgataacattgcaaagtggtattagtatgctggtaagtatttaatgagaagatgagaagaaagaactaaaagctctggcccctggggaaagacaggtcactggattcagctagggtggaagaaaggaagtaaaattggactcaccaggattgaatagattgaatatattccctgatgttcatcatccatatcgcaagtagacagatatggtgattacacccatgaggcagttatcacatcaccttacgtgaaagttaacgtcataggcttaatctggaacccatttgccctaattgaggactccacaggaaagaagagtagagcctggctaatcaggagagagatgtgcagtgagttgcttggatccctaccttttaatcagaatggtagattgctctcatctcttaattggtggtggagttttgaatgagtcacccctcagccacagtttcctcatctacaatgtaggataaacaataccttatgtccttcaaggcaaggaattggatcagatgatatcatgaggcctcttaaggttttaagctgtgattagaacccaagagtcagaagatacatctcacagcacccagctaaccagccctatacttttgtcagaaatcatctcagaaagacaaagtcagtcctgtatttcaagccttcaggaggaagaacagagcctttctcatcagttccattcacctcaggatttgctttcttctttgtgaactaaattccacgtgtaattgagaagcaatgtctgagaaaatggaattttacagcctctatagaatagtaaaggaaaaatgaagtgggatactgaatctggaaggctttctgttgacacaaaatgaaggtgtacaacaaggagggcagctttccacgaggaacttccatgaggctgtgcagccagagaggaatagggtaacaaccctggtacagctaacacctccaacacgtgtgtgagcactgtctgcaagccataatccatagcagtggcaggacaggctcgccaactgagtggttctggaaagctgccttttccttttagtgattcaaggatgcttcaacgtggattttttagttcctgttatgagccagtgaatacaaagatgaacatggtagatgggggatctggcttcctggagcttaaaactccaggatgggggatctggctttcctggagcaagaaaaccagtggttttcttggccgaagaagtgaagagaacaaacagcagaggataatttggtaatcagcatcctagtgtgccccagggtactctcttaaggaaatccagtcctggagcacacccagtatggtccagcctgctgtcttcgtaggtctgagtgccccagtatttgcaaagtgttttggagcctatgaaatgctttcacacatacaaatctcctttaattaactctcacaatgactctgtgctatgtgtacaattatcacgttttacacacaaggaaactgaggcatggagcattgtaataatacccgagatcttctcactccatgaccaatgcttttcttctccattccagttgctttttcaactgtgatgatttataaaggacaatcaaatgggcacatactatatttatgcacatacatacacacacacacacacacacacacacacacaaccagatgtcatttataatccatgtaaaatatttttggggaagtttctctttaataaagtttgaagagacatatattttttttttttgaagaggcatattttttctaacttttttttttttttttgagatggagtcttgctctgtcacccaggctggagtgcagcggtacgatcacggctcactgcaacctccgcctcctgggttcaagcgattcttcagcttcagcctcctgagtagctgggattacaggcatgtgccaccatgcctggctaatttttttttttttgtatttttagtagagatgggggtttcaccatgtttgtgaggctggtctcgaactcctgacctcaagtgattcacctaccttggcctcccaaagtgctgggattacaggtgtgagtcatcacacccagcctataacttttttttaataggtgatagaatcccgtgcttgaaaaataatcaaacaaaaagagaatgcattgtaagaagcctcactgtactcctgtccccagctgcccagttctcccctcctccccacagggaaacatcttcattagtttcattaggttcttatgaaaccttccagagtttctttaagcaaaatacaagcaagtaggactgtcatatcctgcagaccgctacatacaaatacatagaaagtgtcctcattctatcctccagtgatattccattttttggctgaaccacctaaatgatggatatttaggggaagcaagtattttttaaaaaaggtaaaaatcaaaggtttttattttttatttttttaaagaaaagttggtaggctgtgtttattcattcagaagtcaggccgtggctgaactgatagctcttggagatggccattgctcatctctgaatgtctggttttctcttgtaagaattgtgtgtatgatccagaccttcagtgtgtgcactatatattgagaattccagaagagatgatatggacaagaaaaaaagatgactttactttttacagtaaaaataaaacttaaattgaagagtacaattgtttaaacaattggaacttacttagctactgcttgttgaaacaaaatcctttttttaaaaggtatcgaagcaaattaaagctgatccgtgctaaggaagaagacagtggccattatactattgtagctcaaaatgaagatgctgtgaagagctatacttttgaactgttaactcaaggtatgtaaagggagtataaagataatgctagctctgtagatgagtgtcttccaaggaaagcctggcacttttctccccggtcatggaagaaaagcagcacttaggggagaagcagtgtctgcatatgtcacatatcgggaatacctctgctggactcatgaattcaggtatttctgggaggttctgggttactctagagtaggcgaggaatccctaggctccaccagctagctttatttttgtagagatggagtcttgccatgttgctcaggctggtctcctgggttcaagctatcttcccaccttggcctctcaaagtactgggattacaggtgtgagccactgcacctggcctccaccagcttacttagcacctgcttctcaatctgagaagagagaagcagatgaccttagattgttctggagagttttgctacaagttttccttatagacattgtacagtggtccttaccagaagggagtgcccaagtctgtttacattcaggctcagcacctatccagagtcccagccatgagccaggtgctgtctgaggtgcgctcatgtgatcctcacagtaaaacctgtgatacaagcaacaccgtatatctaatttatttgaccacagatttagaaaagaatctttaaaacctaataacataccacagatgcattttggtaaatgctgctttagattatactttagctgaatccattagttgaatcctaagctataatataattttaagaacctccttgcctttcaagccaaataaccaagggactttctctctctctttccctccctcccttccttccttccttccttcttctctccctcccttgttatctcttttcctttcctttctctccttccttccctcttccctttttcctttctctccttccttccttccttgcttccttcttccctccctcctttgttctctcttttcctttcctttctctttttctttccttccttccttcctcactcactcttttcttttcctttctctccttccttccttccttcctccctccctcactctctcttttctttgcctttctctccttccttccttccttttcctccctccctccctcccttgttctcccttttccttccttccttctttcctttcttccttccttccctcttccctcactctctcttttcctttctctccttccttccttccttcattctcccctcccctcccccctcccctccccccccccctcccccctccccccctcccctccccttcccttcccttcccatttttcttctcaccatgttgcccaggcttgcctcaaactcctgggctcaagtgtttctcttccacctcagcctcccaagtagctggggctacatgtgtgaggcatcacaaccatggacttttcactttcttcactccaggttaaaaacatcacagggataaatctcaaaacaccaaaactgtgaaaatgctgctaaccatgtgggtctgtctaaactggagtgttacttgtacaactggtttcagcccctccggagtgttttgaatgccatgtagatgagttgtgaactcatattccactttgtagtctcatatgttctgggacacgagctattccattctgacttctttctgcctcttgcagttccttcatccattctggacttggtcgatgatcaccatggctcaactgggggacagacggtgaggtgcacagctgaaggcacgccgcttcctgatattgagtggatgatatgcaaagatattaagaagtatggaaaacagatgtgtcttcttctttcgtggtcagaatatttctcccttgacacaaatgatgtcaaatacattttacttattgactataagatagggttttgggtgtgatagcttcagggtgtgtatcttttgtcatgaatagctgtgagaagaaggtccagggctctcattagaccttcaaaatgtctccaatctaaaaacaagagtgaattttaagaaccactgttctaagaagatttttactaccctggctcacatatcttatttggtgaactttgtttggtagtcggactgcatgtaaacataaatgtgactgcttagtcccttatctgcccacctgctgtttggtgggttaattcgccattccctcctccctcccccgagtcctcagccttcttaaatgggcacatgagcaatgtgtttacacttcatccatggtaactggttgtgttcagaagcctcagttgtttcttcctctagacagagactcctcatcttaacttctagggctaagaacagacttggatgttgactggggtttctagtagattccagtgtggagcaggattctaggtcttataactcaatctgaggatcatcgcaaccctagtgacaccctaggggctcttcccagtgtgagtgttgagaagggagggctccaggcctttttgaaggggtgggagattgagatcattaaatatggttgaagttgaactgttcagtttgctcataggttcaagattggggaatggtagtcatattttattaaacttgattatctctgcctgctatgtaaacacttagctttcagttgttcatgtgtgagttattccctcttcagcacatgcagacaagttttaatgttcatctgcatgtaaaataaatcagtgtgtattgccccgaaatgcagacaaggtcccaactccttgccatcttagagtgttcccgtggctccactcattgccatgactctcaggaattggccctatacttaggccctttttctctctagatgtaataatgaaacttcctggactattttggccaacaatgtctcaaacatcatcacggagatccactcccgagacaggagtaccgtggagggccgtgtgactttcgccaaagtggaggagaccatcgccgtgcgatgcctggctaagaatctccttggagctgagaaccgagagctgaagctggtggctcccagtgagttcctcaacagtcaggacaactcatcagctgagccgcatctgccccaggcggaactttgaatcccagataggggtcatatagaaatgaaggtcccaaggcagaaattcagttacgaatgctcttaaaggcatgtgggactttgttttattttgttttgttttttgagacagagttttgctctgtggcccaggctggagtgcaatggcacaatattggctcactgcaacctctacctaggacgttgttttagattcagatccaaaactgcatttttgcagaggcccctcaacattttgcttgtctaataatatagctacagtctctactttgaatgtctgtgtatgtggatggagtgtggggaaggatcttctgtctcattgctccttaaaagatagatgaagccaaaagcaatataagcaaaatgcaacttacaaaataagctttataataaagcatatgaagtagaggtgtctgcccatatagtagctgtcaattgcatttatcctattcaaattctgtccacaaggttactgttggagcaactttggagaaaatactgagttctcctgattgaattttgtccccttcttgtataaggaaagagttgatgtagtttcctgggtgtagatggtttgagagatggtactgcctatccctaaaatgaaccaggcagccctcacacttccccaccagcagtgagagattcctggctcagacacagccacactaccttgctgcccctgtgcatgtctgccaggaaacttttcattgtgcctctctctcttgtcacgtagccctgcgttctgaactcacggtggctgctgcagtcctggtgctgttggtgattgtgatcatctcacttattgtcctggttgtcatttggaaacaggtagatattttctcataaaactaaagatctttgaagccaatgagaacaagcatagcaacctagttcagtgcttggcacagagaaggagctcagcaattacatgtggagtgaacgttgttggactctactgtgtccagtcactgtgctgcttcagtgaagctctggtgcactgggactttggtaattcaccagttacctgtcctggtcatttatagaaaccgaggtatgaaattcgctggagggtcattgaatcaatcagcccggatggacatgaatatatttatgtggacccgatgcagctgccttatgactcaagatgggagtttccaagagatggactagtgcttggtaagttccatggggtaacctcccaagactcccttttcccttgcacacaactttacaatttataggccttggcagaatagagatctgagcttgtgcttagtaagaactaggcaatggaaatttgctttcagaaatacatttctgtcttgacagtaagttaattggatcattgcaatgatttttttaaatctctttccataacaaattatagttaaggaaaattttacaaagggagaagagaatatgaagagggctggcaaagatacccaccaaaattgcttttctttagaaatgacacaaattgaaaatgaatttctgtgactaaaaatgagcagatgagaaatgaatgaggacaaccacaaaatgtattttgattcagtacattctgaagatgcattagatactcctttttacatatttggaatatggaatataaaaatataggtacattttgaggcaaaatatgtaaaaataagcaagccaacttatcacaagcatttcaagtatttcaatcctgggctgagaccaagtatatgaagctttagtccaagggagtatttcttttttaaatcacattcctaatgaatgaaagcaagacaaaggcaaatgaaagtagaggtagaggttgtgttatgatgaatgatctaacagtatatatgttaaagaatgccaaatgcaggttttaattatccaccggtctcattgcaaaatacagaagagtttaagtcttcttagagagttaggtaaactgaaatcaagcaaggcaccagagtgaaatcacctttgcaaaaattgtaactgaggaaattatgacagtgaatgagatatgacctaaccaactccattttgctttagcctccaagttgtccttgttccttcctgggcataggccgaactaactttgagaggaacttagtttatagtttgactttgaaaaaaagacaataatagccctttgccaaaacaaaccctctttttgcctgggaactagactgcctttgcgggactaacgaattagctacaagattagaaagtatggtttaggggtcactgttgtaaaacctgaggtcagtgcttgagatattttggagaccctgtatttcgatgcaccagctgacaccacccaggtcaataaactggctcatctgatcttggggcccctacctaggaactgactcagtgcaagaggacagcatcagctccctataatttcatctttgacccaaccaatcagcactccccttttcaccccctacccaccaaatcatccttaaaaaccccattcccccagtttcagagacactgatttgagtaatagcagaatagtagaaattcccccagtttcagagacactgattcgagtaatagtagtaatagtagaataggtctcccgtacagctggctctgtgtgaattaaaccctttttctattgcaattcccctgtcttggtaaatcggctctgtctaggcagcggacaaggagaatccatggggcggttataagagctgccccccaatttcaaatatttatatctaagctttctttattttcctgcctatttcccaacaagggatgaggagcttagggagttaaaaagtagtaaaatatggggaaaagggcataattcccattataccaagaggcattgctggtgaagcaatacctttccaggtacgattttcagtaacacagacgtgcagtaagaggcagtgttggctgttagtgtcttttatgagccaagtcttttcctggcttggctatccgtggtgagactgacaccccgggaaatgtttctctcagggtgagctctttcagggtgggacaacagcttcagtgtctttacgtatgtctcctcccaacatgaagctaattgctgtgctctcgggcatgtttagctcttggtagagtggctttcctaacaaatagggagcagtgagcccagcctgaagtttttatttagtcactccttagaatcagtgatattttgaatactgaagtatttccagtggctagtaatttactaagacaaaagatgcccctgtttgcatatggaaaacagaaggggagagagccaggaggtgtgggtgagagccccgaaggcaagaggatcccaggggctggcccagcacggagctggtagacagcgcgctcacaccagggagggctgcaccctcctttctcccgtctgtgttttctttcccttgcaagtgttattcgacaaaagcaattatgctaatttccttccctgtgggctcaattccttttttgacacgatgacttggaggagtcattatgattactccaaacaggaaagacactcgcccagctgtccgcccgcagagagctggctacggtgcagaaagctgaggaggcgtctggagtttttgggtgttaatgattctgcctgcccacaggtcgggtcttggggtctggagcgtttgggaaggtggttgaaggaacagcctatggattaagccggtcccaacctgtcatgaaagttgcagtgaagatgctaaaacgtaagtgctccttcctggggattttttgagcacggggattttttgagcatggggatattaagggaatttctcaaaatcatgcagctagtaaataagacatttaggactaggtcctgattattttgactccaggttttatgtgtatttagattaggtttatttagattgctcttgctgcctgtatgttggaaaattaagagcttgttatttccagtgacttctttttactagaaagaccaggaattagttattagcactgaggccaagtagctatttgcttcttttagacttctggtaaatagaatgatatccaatcacaggattagtcatattcttggtttttttctgagaacaggaagttggtagctcagctggactgatatgtgatttattctttcaacagccacggccagatccagtgaaaaacaagctctcatgtctgaactgaagataatgactcacctggggccacatttgaacattgtaaacttgctgggagcctgcaccaagtcaggtgggctcactgacctggagtgaggattttcactggacacatgtggttgtgaaaactgttcaatcaggcttaaatcctccactctccatccccacacatggcagggaatagaagtcccttgaatggagctgactggtcccttgaattgatggaagctcattggtttttgagcaaaatctgttgccagtccagtcatagccattcatggctctttattaaaaaaaaaaaaaaaaaaaaaaaaagcttttttggtatcttatttttttctgcgccatatggtctgcaggacaattcatggcttttctgttcttcattttcatacccatctcctaacggcttttgtccccataggccccatttacatcatcacagagtattgcttctatggagatttggtcaactatttgcataagaatagggatagcttcctgagccaccacccagagaagccaaagaaagagctggatatctttggattgaaccctgctgatgaaagcacacggaggtgggtgcaaagagagatgttgctgtctatcattatcttacaggcatcacaaatggaaagacccatgtcctgatagatatcatgtctgcagattcagtgcccaaggtagcaagacttagagtcaaaccaccctgtccagtctttccatggtcatgcagagagatgcatgatgtctaaaggtgttttggactggggtgtcacatgggaaggccttgctgataggtttgaatgagagtgagttagaatgactctgggagctcttctgctatttacatgtgatccacttagacctataaaatgcagctctggccagggatgcttgagttctggaaccttgcaagaactgtctgtggatctccaagctcgaggtccttgctgaacctggacctataaatgacgtcaatgatagtgatccctactgcagaaatctacaagtggctataaagaactctgtaggtaagaaattctgtaagatcagaaagtacaatgaattcacttcataataaattacttggtggacaccaaatgggtgctaaattgattgggtagaaggaattgtatgcccaagccacatgaccacacggctcaagttccaaccaaggcttgtgagttgaaaaactgagaaagaataatgacagacttaatgtagtgaattcttcaaactttaagtgtaatggacttacaggtccatgggagcacagccccactgtcttagatgtggctcttcaggatgtgcgggctcctgctaaagatgtgcagggaactggctctgaaaacaagtgaacagtagtcatcatggcagctgacatttgtggagtcctttgtatgtgccaggtgccatgacaaatattccgctagtctttcccatctttgtcagtgggatccattctacgtcttctgaaaagtgcttccttgacccccagatcaagtcattttccttacaagctattgaaacctttcttccttcacaacacagctgagtttgagttgatctgtgtatttattttgttttttacatttctttttttccctatttaaaaaatttttttatttccataggtttttggggaacaagtggtatttggttacatgagtaaattcttcagtggtgatttgtgagattttggtgcacccatcactggagcagtatacactgaacccagtttgtagtcttttatccctcacctgcctctcaatttttccccgagtccccaagtccattgtgtcattcttatgcctttgcatcctcatagcttagctctcacttatgagtgagaacgtacgatgtttggtttccatttctgagttacttcacttagaataatagtctctaatcccatccaggttgctgcaaaagccattaattcattcctttttatagctgagttacatatatatatatatatatgcacacctacacatacatatgtatagatacactgcagtttctttatccactccttgattgatgggcatttggggttggttccacattttttcaatatgtgaattgtgctgctataaacatgtgtgtgcaagtatctttttagtatgacttcctttcctctggtagatacccagtagtggaattgctgtgatgcatgtatttgtgcgactatttgattaatgctcatttccttgactagatcacctcatgtgaaaggtatggattggttttgcttttacccagttagctcccatgcctacctcagtacctggcacataatcatcatctactgaaagtggaatgaccacttcagaagggcaccctgggtaagatttctctttctgtttttacagctatgttattttatcttttgaaaacaatggtgactacatggacatgaagcaggctgatactacacagtatgtccccatgctagaaaggaaagaggtttctaaatattccgacatccagagatcactctatgatcgtccagcctcatataagaagaaatctatgttaggtaaaagtgtctatactcactctgggtgttgggactttccagtggtttaatatgatacttaaagtatttagagggaagtgtatagggatggtaagtgaacctggcagcccacgtggtctctaaatgcaggtctgcacaaccagttctgtgacatgtttccaggtttgtggcctgtaaattgaaaagaataaaagctgacaatgtaacaaattttttaaactttaaatttaatagttttaaagaattttcttggtgtgttcctgcagtaaacattttaaaaaaaaaataattatttattctgatataatgaacttccttttttattgctgtctttttcttttttaatgaaaatatggtgattgattttttttaatgcccttacttggcagaattacaagttggctgtcttatgttggttcctcaccttgctttttttcccttaagttttagaagtctctgatgtctatgagttcagtaacccttgcttttacttttcctaacattcaatttgtgataggaactctagagtagataatttgcagttatattttctggaccagtgtttctgttgaatgtattttgaaggtgggtctatctgtttttcaagtacatgaatatgtggcagggttaaattgatttataaactccagggagtccagctgatgcccagaccagatggatcacttcacatctgctcagggtggttcctccagagccctgaactggtcacagacatgaagctggaagtctgacattggcttgtcctgtgagcttgcctttttgggtctgagccttcccattagtcaatgcaaaaaagtgttgagctgccctggacattgttttggaaattattgatgtgctctgaatgttttcaggttcttaagtgaaaggtacaatccatttaaaaaagaatgtgtttgttttgcaaagctcagtacacaatattttccatttctgcggttccaagttccattcacttctcattgccaaatgggtgaacttccaagcgcttttaaaagattagccagtgagagttatcggaaccagtacttcctctcccctcccatattgttaaaaatagtttacattgcttcccaggctgggctggtggagttggcacgagatgtcagaggaacctgagtcatgctcaggcccaagccctgttggcaggcagaccactgctttctggccttccgtgactatctgaaaaaaatcgtgaatggctagagctactcttcacttgctgaacattttcaaaaagaattgagaacttctggattaaattgccttcttcctcgaaaaccctgggacccttccagatgggactaactggggaaagtggacaagttacaaacaaagaaactcaaaggaaagtcattggcactgatctctaagatgctatcacatgtgattggtggttgattttattaacaaattataagcaaagtactacaaaggtggctttaaaaagaaaataaagcaattcacagaaactactttttcatgtagcttgtatgtgtgctccatgtatttcatcatggaagattttagtgtgtgtttatgtgtatgtgtgttttaaaggtagctgagatgatttgctaattatggttgaaaaaaagaaatttaggaggtaaacaaaataattatgtgtaagattggtccttgtggctgtgtgtgtgttttgtgtgtgcgtgtatgtctctgtgtgttttaggctgttcttttattgctataaataaatacttgagactgggtaatttataagggaaagaggtttaattagttcatgattctgcaggctttacaggaatcaagatactggtagatctgctcagtttttggagaggcctcatgaagccatgaagtcatggcagaaggcaaagcagtgcaggcacatcacatggccagagcaagagcaagcgagagagagaaagagagaggtgccacacacttctaaacagtcagatcttacaagaagtcacttactattgcgaggacagcaccagaaggatggtgctaaattgttcgtaagaaatctgtccccatgatccattcatctgccaccagtccccacctccaatactggagattacaattcaacatgagatttgggtggggacacatattcaaactatatcatactgaccctggaccctcccaaatctcatgtccttctcacatttcaaaatacaatcatccctccacaatagtcccctcaagccttaactcattccagcatcaactcaaagtccaaagtcttatctgacacaaggcaggtcccttccacctatgagcctgtaaaataaagaacaagttatttactttcaagatacaatggggttataggcattgggtcaacattcccattcccaaagggagaaatcggccaaaagaaaggggctacaagccccacagaagttcagaacccagcagggctgaaaactccaaataaactccattgactccatatcccatatccagagcacactgatgcaaggggtggagctcttgggagggatggaacaccctgtggctttgcagggtttagcccctgcagctgctctcaggggctgttgtcgagtgcctgtggtttttcctggtgcagagtacaggctgttggtggatatattattcatggaggatggtggccctcccctcgtagcttcacgaggcagtgccccagtggagactctgtgtggggacttcaaccccacatttcccctctgcagtgccctagtagaggttctctgtgagggctccaatcctgcagcatgcttctgtctggacaccctggttttttaatatatactccgaaatctaggcagaggctcccaagcctcaactcttaacactctgtacacccacaggctaacaccacatggaagcggccaaggtttatggctgtcacaagctgaagcagcagcccaagctgcacctgaactcctttgagccacggctggagctggagtcatagggatgcagggagcagtgtctcgaggctgcacagggcagtggaccctggggctggcccatgagaccattcttccctcctaggcctctgggcctgtgatgggaggggctgccatgaaggtgtctgaaatgccttaaaggcctttttcccattgttttggcaatcagcctttgcctcctttttagttatgcaaatttctctagcaagtggttgcccagcagccctctttaattctctcccaaaaaagcttttactttctctgtcacatggccaagctacaaattttccaaccttttatgctctgcttcccttttactttttttttattttaaagagatggggtctcactatgttgtccaggctagtttgaactcttggactcaagcaatcctctcactcatcctcccaaagtgttgggattataggtgtgagccactgcgcccagcctctgcttctcttttaaatataagtttcaacttcaagtcatttctttgcttctgcatctgactgtaggctattggaagcagccaggccatatcgtgaacactttgctgcttagaaatttcttccaccagatatcctaggtcatcactctcaagttcaaacttccacatattcctagggcatggacataatgtggccaagttctttgctgaagcttaacaagggtgacctttactccagttcccaataagttcttcattttcatccgagaccttggcagcctggatttcattgtccatatcattatcagcattttggtcacaagcatttaaccagtctctaagaagttccaaactttccttcatcttcctgtcttcttctgagccctccaaactcttcttatctctgcctgttacccagttatctttacagcaattccccattccttgataccaattttctctattaggctgtttttgcattgctataaagaaatacctgagactgagtaatttataaagaaaagaggtttcattggcacatggattctgcaggctatacaggcatttgcttctggagaggcctcaggaagcttccaatcatggtggaaggtaaagggggagcaggcatatcacatggccagagcaggagcaagtgagagagagagagagagagagagagagagagagagaggtgccatacagttttaaacaggcagatcttgcaagaagtcactcacttttgcaaggatagcaccaaggggatggtgctaaaccatttgtgagaaattcacccccatgatccagtcacctcccaccaggccccacctccaatactggggattacacttcaacatgagatttgggtggggacacatatccaaactatatcattgcgtgtgtgtgtgtgtgtgtataatttttaaaccagatatatgtttctgcatatctctttcctttctttcattctttctttctttttttttttttttttttttgagacagagtctcactctgtcacccaggctgcagtgcagtggtgtgatctcggctcactgcaactcattgcaacctcctcctccctgattcaagcaattcccctgcctcagcctcctgagtagctgggattacaggcacatgccaccatgcctggctaatttttttgtattattagtagagatagggttttaccatgttggccagactggtctcaaacttctgacctcaggcaatccacccacctcggcctcccaaagtgctgggattataggcataagccaccatgcctggcctatatatctattttctaagatagaatctttgcatagtgatattcatctgtgagatctaaacattctacaaaaaaattaagaaaatatttttggatgtgttctttgggcatgcctctgcaacctgatgatttcctgctgcctgccagcaccaatacatttaatttcttttctgcagactcagaagtcaaaaacctcctttcagatgataactcagaaggccttactttattggatttgttgagcttcacctatcaagttgcccgaggaatggagtttttggcttcaaaaaatgtaagttcaaggaacacagacctttttagacccagatttcagtgagtggagtgtggaaggagatgctaggagatagatgttggaaaggccattaataacaggggcctcttacttacctgtctctctccttcatcccctacgcaggtcagggagtctgaaatcatcaggcatctactcttctctagagctttctctctgttgggagtgggtggagtgagaacctgggagaaggccagccctttatatccaggcagacagctccaagtgccaccatggatcagccagtcttgcaggggtgatgctatatcagctacagatggcttgatcctgagtcatttcttccttttccatgcagtgtgtccaccgtgatctggctgctcgcaacgtcctcctggcacaaggaaaaattgtgaagatctgtgactttggcctggccagagacatcatgcatgattcgaactatgtgtcgaaaggcagtgtacgtcctcacttccctcactggtcaggctcatcctccttcactttaatctctaaagtcaggtgttgcttctagagattcggtgcctgttttttaaaacatcaatagatttcaaggggtcagtacactgccttggcagcagattgcccaggtgtgagtgccagctccaccacttacttaatttggatttggggctagatacttgactgttctgcccctctgtctccctgattgtagtgggaggtgataatagtacctatttgctgagttgctatggggattaaatcaatgaattcatgtaaagtgcttaggacagtgcctggcatatagaaacagcactcaataatgttagctattttatttatttatttatttatttatttatttatttatttattttctttttttttgagacagagtctcactctgtcacccaggctggagtgcagtggcgcaatcttggctcactgcaaacttctgcctcccaggttgaagcaattctcctgccttagcctcccgagtaggtgggattacaggcatgcaccaccatgttcagctaatttttgtatttttagtagagacagggtttcaccatgttgcccagactggtctcgaactcctggcctcaagtgatctacctgcctcagcctcccaaagtgctgggatgacaggtgtgagccactgcatctggcaagtgttagctattaatatgtcaattgcgtgtatgcatggacaagcatgcattcccaaggatggtgtctttatattttaagcttttatcagattttcaaaagccatctgtgacccctaaaatagattggaaccatttgggtttatgtatcttggaggcacagtttccttaaagatactcattttgttgtctacttgaaccattcttcccatcccttccacttctcagcagatgacatagctccctgtggggatatatctgctccctgtaggtacaattccaaatcacctcactgcactggatgtgagacagcttatggcagctgctgcttccacctagagaaagacatgggcctgcatccatgctgtgtgtgattcatgtactcatgtggccgtgatagctgtaatcggctcatagatcattggatctgttcttagttttgttcccaggaatatctaaaaataggaaactggtccattcagggcttacaccttttgggtgaaaattcaggattaatgtttttggatattattcctttggaggacataaaaggcaatattgaccattcatcattcatctagtatttattgagcacctactatgtgccagggactgagagttcagtaatgaacaaaacacatgtaaaagacactcaaatgggacaagataattagcacaagttattaagagcccaaggggaacccttttctatttccactgctgtggatcatcagtgagtagacatgggtttaactgtctccctccttccttgcagacctttctgcccgtgaagtggatggctcctgagagcatctttgacaacctctacaccacactgagtgatgtctggtcttatggcattctgctctgggagatcttttcccttggtatgggcctgacattgctgcttatttgggctgttctgaaacaccactggaaggaaaatgtgttctttcaagccccaggatgtagacagtgttaagataacctggtgtgaggccagtatgctgcagccgcctcaaaccacatgttgtgccttattgtgtctgagataggcccatgcaggtggagatgggggtttttgttgggggttgcgtctcactcctggcctctgcccctcctctcctttgggctatgccagagtgacttcctcccactggaagtggtcccaatgacattcgcatcccagctgctttttcattttgggctttgggtcacatgggttcacccatggagagtgggccctccctcacctggtggcgattgatgctcaggtgaaaaggggtacgtggcgggaagggcagggctctcattcctggttgtcattggccagtcttgacaacccaggtgctgaacaacccaggtgccctgggctatccggtgaggtccctaagagaaggatgagccataaccctgacatctggatggttcatctggggagatgagacttacacacttagggataaacagtgtgctgctgatttaaaattgtaatttgagtcttgagtaaagagaaaggagtcctggaatagtgtgggaaggcttcagagagggaacttaacttgacctggccttggctttgaaagtgtgaaatgtttcatgaatttatctgtgatcaggatgtaatagtaaagtgtgtcttcctgccccgtctcctttttcatcctagttctccctccatggatgatcacaatggatcatccccgagtggcttaatggagtcctgtactcccttaaaagcagagaggccacaactttgatttttgctttagctatttgaacatacctggtgaaaaagactctctgggttttaatgattcagaatttctccttgcttttctagttcattttgtctgtgttgatccagtagtcatacacattgaaaaacacttgaacgcttatttctaaagatgtagaatttttgtgatggtacttggacttgaccaacctggagtcctaattaaacttaaggtttgagctggtctctgaagtcaaggagatgatgacactgaattttcttgaaaaaaccagtgcttcaaggctataggatctgaaaggttttctaacagtgttctatcatgccaagtgtttcagcaatgcactgagcgtttgttagtcctggtgttttattgtttggcttttaggtggcaccccttaccccggcatgatggtggattctactttctacaataagatcaagagtgggtaccggatggccaagcctgaccacgctaccagtgaagtgtgagctccttccccatcccgggggcctgtgttcacagtctgtgggtctagggggagggaggggccctgagacttccccctgtgcccactcttgagttctgtccccacagctacgagatcatggtgaaatgctggaacagtgagccggagaagagaccctccttttaccacctgagtgagattgtggagaatctgctgcctggacaatataaaaaggtgtgtttggatctgtgggtggaaaggtctggataaagctggaagttataccagtgagctgtgctgttccgcagttctagaggagcattttcaaaagaggcaaaagactgtgtgatccagtggctgggcttcatggcggtgctccacgagaccctagtagcaatgatgaatgaaaaccctccccttcccgtggggctttcctttcatcttatatgtgcagtacctgtaagcactattctccagatgtttgagtatcagaagttagtgtgcagttagaagactcagggcatccatggccattacatcactaatttgagtgcacttaaatccatgcgaaattggcttttaccagcggactggaaggaacaacctcagctgttatctgtggcaccagctggttttttgtggaataggaagcattgttcaaaggaacaaatgtaatttcttggaaccaggcaggatatgtaaatgaatgaaacaactttctgctgaggtgttgagaggaaaactcagacataacctcagtttcttagattgagattagtccctgtgtagactttttatacttatcatttttcttccttcttctcaaggaggaatagtgttaggagattgtgtgccgaactggaagttaaatgcttctgtctgttaattatctcactgcccactacaactttcacaggtgaggcagtgaggaggcagaaggaaattaaccctcagttggtcaaagatgctctgactggtggaaatgtgttggtgggaagagattgaagttattgttgaaaatagggtcttttcacatccaatgtgagacctctccaatgtttaaggatcatgaaggctttgggtattatccacccaatagaaggcctcactgcctctctatgggacccatccaagccctggaaaggcaacgtgatggggaccagaaggattctcagttgtagctactgacttggagaaggggctactggtatcttagcacctaatggcagaagctctttaccattggtggccccttcttcatgttctatgtctctggggatagttgacatgactctccttcaactaagtcccacatcttccaggtagtttggaaatatgtacagttaaataatggtaagttctgagtgtctctattcatttttgaggtttggttgttaacacttgattaaatatgttcaatgaatgtttatagagttatgaaaaaattcacctggacttcctgaagagtgaccatcctgctgtggcacgcatgcgtgtggactcagacaatgcatacattggtgtcacctacaaaaacgaggaagacaagctgaaggactgggagggtggtctggatgagcagagactgagcgctgacagtggctacatcattcctctgcctgacattgaccctgtccctgaggaggaggacctgggcaagaggaacagacacaggtagctgtgggggcagcctcggtgtctcacctttcccctcccctataggccctgaaggagaggacccattttcccgataatggtgcactcccggttggtaaatatgtactcagggacaagttgcagaatcctcaggaggtccacgtggttttgaaaatgcttcccagatgattctaatatgttccccctggggctgggagagggatgtgcatgttgtggggagagggacatgcttccctggtggagaatctttgagctaaattctcaggtaatttgatcaaattgatacagaactgtgattactgagatcatataagcctctcctgccattgtcttaaatagtcattgaactggggaaaaagtgaagagaggcgggactgggtcctttgacgctataccctacctgtgaatttgaatcacctgcagagatttaaaaactgctgatctacaagcctcacccaaaacaacaaattagaatccctgggggtggtggccaactgctccctggctgatttgtttcttctttcttttaaattttgtattatggaagatttctaacgtgtgcacaattcacatagtatagtgagctgttcagtattcgtcacccagcttcaatgactatgccctctgccagcctggatgcacacatggccatgtctgtctctcctcagcctcctctggattgtttggaagcaaatcctagacaccttatcatttcacccataaatattccagtgtgtgtctcttaaagataagggctctattttaaagaagaacaacagttattaaaaataactacaatgccgttatctcacccaaaacagggacaataaatcgttaaggcatcaggcagccagttaaagttcaaattatctcacaaatattatcatactccattaaaaagtgggcagaggacataagcagacacttttcaaaagaagacatacctgcagccaacaagcatatgaaaaaaatgctcaacatcactgatcactagagaaatgcaaatcagaaccgtgatgagataccatctcacaccagacagaatggttattattaaaaagtcaaaaaataacagatgctggtgaggttgtggagaaaaggggaagcgtatacactgcttgttgaagtgcaaattagttcagctattgtggaaagcagtgtggtgatttctcaaagaacttttaacagaattaccattggatccagcaatcccattactgggtatataaccaaaggaatataaatcattctaccataaagacatgcatacgtatgttcactgcagcactattcaacgatagcaaagacatggaatcatcctaaatgcccattgacagtagactggataaagaacatctggcacatatacaccatggaatactatgtgttgataaaaaagaacaagatctgagataccatctcccaccagtcagaatggctattatttaaaagtcaaaaagcaacagattgtggcgaggttgtggagaaaaagaaacacttttacaatgttggttggagtgtaaattagttcaaccattgtggaagacagtgtggcgattccccaaagacctagaggcagaaatactgtttgacccatcaatcccattactgagtatatacccagagtgatgtaaatcattctattataaaggcacatgaatgtgtatgttcactgctgcactgttcacaatagcaaaatcatggaatcaacctaaatgcccatcaatgatagactggataaagaaaatgtgatacatatacaccatggaatacgatgcagccgtaaaaaggaatgagatcatgtcctttgcagggacatggatggagctggaagccgttaccgtcagcaaactaacacaggaacagaaaaccaaacaccacatgttctcacttataagtgggagctgaacgatgaggacacatggacacatggagggaaacaacacacactggagcctttcaggggttggggattgggtggaacatcaggaagaatagctaatggatactgggcataatacctgggtgatgggatgatctgtgcggcaaaccaccatgacgcatgtttacccatgtaacaaacctgcacatcctgcatatgtacccctgaacttaaaaagtggaaaatacaaaaatgaaattaaaaaaagaacaagatcatgtcctttgcagcaacgtggatggagccggaggtcactatccttagcaaactaatacgggaacagaagaccagataccgcatgttctcacttataagtgggagctaaaacaacgagaacacatggacacaaagaggggaacaacagacaccagggcatagttgagggtgcagggtgggagaaggaagaggatcagaaaaaatacctatcggatactgtgcttattatttgggtgatgaaataatctgtacatcaaaccgccatgacatgtgatttatccatgtaacctgcacacgtgcccttgaacataaaataaaagttaaaaaaaaattatcatacacttgttttgttctgtctgagatccagataagagtcacacattgcacttggttgctatgtctctgtaagttcactatgcctctattttttgccctcttacatattatttgtgaagaaaccatagtgtttgcctgtggagttcccacaatcggcattttgctgattacatccttgaagtgtccttctcaggtgcttctgtcttctctatgtgttgtaaactggtagttagtctaggaacttaacctgactcaggttagatctttggcaaacatgcttcatagatggttctgtgtgcttctgtcaagaggtatgcactgtccagttgtctgccttttgtaacattatcagtcattgggtgatcattacctagaatttcttttttttttttttttttttgagatggagtctcgctctgtcacccaggctggagtgcagtggtgtgatctcagcttactgtaacctccacctcctgagttcaagccattctcatacctccgcctcctgagtagctgggattacaggcacatgccaccatgcccagctaatttttgtatttttagtagaaatggggtttcagcatgttggccaggctggttttgaactcctgacctcaagtgatctgccggtctcggcctcccaaggtgctgggattataggcatgaaccacctcacctggcctagattctttaactcagcaccaaggtggagctaatgcccaggcaggactgagaatcactggttgacgtggtcagatggaggagaccatgccccagttctccgctgtctttgcatggcccttggacagaggtaggagaaggtgatgatagtggcccctagttcaaggtccaagttgcttgtgtgtgtgtgtgtgtgtgtgtgtgtgtgtgtgtgtgtgttttcctcttctttcccatcagaacattattttggaggcttatgactgtgacctttgttaaccaatttaggtataatatgtagacagcccttgtttatttgtatggactgggtaattttgaaagtatggcttttctattttgttttagaatatgttatgtgatttgaagatgggacacagtggcccatcagtcttcggttttttattatgctttgctcaggccagtttttataacgtgtttatatctcttgagcatacggtgttcctccaagttttgggggtctgcgatggaacttcacgggggtcggggaaggctgggcagtgaatctagggctctctgtctcagatcctttctcaatttggttactttgtgtttgtgggctctgaataatatttgagttgtaagagggttctgcttttatataaagttagaaagtcacattggaataaataacatgagaaaggtgcccagaagttttctagggctacaacaggctgagctgcagaatttgacacgccaggaattgaactttctcagttgaagttcacgttcaagttaagtaacttgtgtggcatcacacagctagtaagtggggggaccattccagacctaaggctttctgactccagaactcccctttcagccacttctctagtacgtaaggagccgtcacctgggccctcaagttgggggttggtgggggggcatttgatgtcaagagagaggggaagagggcattccaggcaagtggcaggagatcctgagaacacagtttggatgctcaggaggcttccgggagagcacctgatgggcctggctgcagcttgcaccctgatgggcctgacttcaccccctgctctgccttcccaggcctttggatcaggcattgcttatgttctcttccactaggattgagtagggaaagtagaaattcttgcagcttgtcagtaactttgatgaaagacccagcagaaaagcaggaaagctgaagagtaaaaatgatgggtggaccttggttttccacgtggcctaccacagcatgtcaggcctgggggcagaatcttgccatactgtgcagcccaaatttgaatgccaaaggctttcgtttgtctctggggggccacagtctaggtctagttctgtgtaggagttgtaatatttgctcttctctccctcctccagctcgcagacctctgaagagagtgccattgagacgggttccagcagttccaccttcatcaagagagaggacgagaccattgaagacatcgacatgatggacgacatcggcatagactcttcagacctggtggaagacagcttcctgtaactggcggattcgaggggttccttccacttctggggccacctctggatcccgttcagaaaaccactttattgcaatgcggaggttgagaggaggacttggttgatgtttaaagagaagttcccagccaagggcctcggggagcgttctaaatatgaatgaatgggatattttgaaatgaactttgtcagtgttgcctcttgcaatgcctcagtagcatctcagtggtgtgtgaagtttggagatagatggataagggaataataggccacagaaggtgaactttgtgcttcaaggacattggtgagagtccaacagacacaatttatactgcgacagaacttcagcattgtaattatgtaaataactctaaccaaggctgtgtttagattgtattaactatcttctttggacttctgaagagaccactcaatccatccatgtacttccctcttgaaacctgatgtcagctgctgttgaactttttaaagaagtgcatgaaaaaccatttttgaaccttaaaaggtactggtactatagcattttgctatcttttttagtgttaaagagataaagaataataattaaccaaccttgtttaatagatttgggtcatttagaagcctgacaactcattttcatattgtaatctatgtttataatactactactgttatcagtaatgctaaatgtgtaataatgtaacatgatttccctccagagaaagcacaatttaaaacaatccttactaagtaggtgatgagtttgacagtttttgacatttatattaaataacatgtttctctataaagtatggtaatagctttagtgaatcaaatttagttgagcatagagaacaaagtaaaagtagtgttgtccaggaagtcagaatttttaactgtactgaataggttccccaatccatcgtattaaaaaacaattaactgccctctgaaataatgggattagaaacaaacaaaactcttaagtcctaaaagttctcaatgtagaggcataaacctgtgctgaacataacttctcatgtatattacccaatggaaaatataatgatcagcaaaaagactggatttgcagaagtttttttttttttcttcatgcctgatgaaagctttggcgaccccaatatatgtattttttgaatctatgaacctgaaaagggtcagaaggatgcccagacatcagcctccttctttcaccccttaccccaaagagaaagagtttgaaactcgagaccataaagatattctttagtggaggctggatgtgcattagcctggatcctcagttctcaaatgtgtgtggcagccaggatgactagatcctgggtttccatccttgagattctgaagtatgaagtctgagggaaaccagagtctgtatttttctaaactccctggctgttctgatcggccagttttcggaaacactgacttaggtttcaggaagttgccatgggaaacaaataatttgaactttggaacagggttggaattcaaccacgcaggaagcctactatttaaatccttggcttcaggttagtgacatttaatgccatctagctagcaattgcgaccttaatttaactttccagtcttagctgaggctgagaaagctaaagtttggttttgacaggttttccaaaagtaaagatgctacttcccactgtatgggggagattgaactttccccgtctcccgtcttctgcctcccactccataccccgccaaggaaaggcatgtacaaaaattatgcaattcagtgttccaagtctctgtgtaaccagctcagtgttttggtggaaaaaacattttaagttttactgataatttgaggttagatgggaggatgaattgtcacatctatccacactgtcaaacaggttggtgtgggttcattggcattctttgcaatactgcttaattgctgataccatatgaatgaaacatgggctgtgattactgcaatcactgtgctatcggcagatgatgctttggaagatgcagaagcaataataaagtacttgactacctactggtgtaatctcaatgcaagccccaactttcttatccaactttttcatagtaagtgcgaagactgagccagattggccaattaaaaacgaaaacctgactaggttctgtagagccaattagacttgaaatacgtttgtgtttctagaatcacagctcaagcattctgtttatcgctcactctcccttgtacagccttattttgttggtgctttgcattttgatattgctgtgagccttgcatgacatcatgaggccggatgaaacttctcagtccagcagtttccagtcctaacaaatgctcccacctgaatttgtatatgactgcatttgtgggtgtgtgtgtgttttcagcaaattccagatttgtttccttttggcctcctgcaaagtctccagaagaaaatttgccaatctttcctactttctatttttatgatgacaatcaaagccggcctgagaaacactatttgtgactttttaaacgattagtgatgtccttaaaatgtggtctgccaatctgtacaaaatggtcctatttttgtgaagagggacataagataaaatgatgttatacatcaatatgtatatatgtatttctatatagacttggagaatactgccaaaacatttatgacaagctgtatcactgccttcgtttatatttttttaactgtgataatccccacaggcacattaactgttgcacttttgaatgtccaaaatttatattttagaaataataaaaagaaagatacttacatgttcccaaaacaatggtgtggtgaatgtgtgagaaaaactaacttgatagggtctaccaatacaaaatgtattacgaatgcccctgttcatgtttttgttttaaaacgtgtaaatgaagatctttatatttcaataaatgatatataatttaaagttatactaaggtttcagcatttttgtttttagtttaatcataagaattaaagcaatcctgttctatttactttcttagcaacatttgtaggactctatattaggccttttttttttttttcctgagatggagttttgctcttgtcatccaggctggagtgcagtggcgtgatctcagttcactgcaacttctgcctcccgagttcaagcaattctcctgcctcagcctcccaagtagctgggattataggcgcctgccaccatgcctggctaatttttgtatttttagtagagatgggggtttcatcatgttggccgggctggtctcgaactcctgaccttagatgatctgcctgcctcggcctcccaaagtgctgggattacaggtgtgaaccaccacgcctggcctttattaggcttttgatgaaccaatagaatatctaaggtttaagacattatatgagctagattgttccacgacacagtatttgacttaaagatgattggcacttggctcatctttggtctcatcatttttttgattgttcatctttatcctgtggtgttttcttcccctgcataaggaatacaggactgcagtaactctgtacaacattcaactgtcgtaaaagtgtaggaagtaaaatgttaaattatttttttcaccgtgtcttcttccctgtccctgtcctgtttccaagaggcagagctgcaccacttggtgtgtcttttaaacttccagttccctttgtatgcatctgtgtatatatattcccatacacacatctctacgtttgcttcatatctacctaaatgggttctcactttatgtaatcctttgtaatgttcttttttctttcctttttaaaactatttattaaagcagttttagatttgcagtaaaattgagtagaaggtacagagatttcccctgtgtgccctgcccccacaccaacatagcatctccatcactaacattctccacctttgctacagctgatgaacctacattgccaaatcattacccataacacagtccacagttctgttttttttttaatgctgttttagcgatctctgtgaaaagtatacagaggtattagctccattggatcccattatgtaaatgtaccataatttatgcaatcatggtcttgtaaaatggatttacagtttccagttctttgctattaaaatgatttcatgaacatttttgcaacatacatatttgcatacaaaaatgtgttttgtagaatggatttctacaaatgaaattgctaggccaaagggtgtgcagaaataaattgatgttgagctgaagtcttcagataggattgatacataagttcttgagcatctgcacgtgaatcactggctttgcacattacatgcagttttctagtctctgctccacattgcccaggaatcatggtcttcaaaataggattggaagaaatacaatgtggtaagtgtgagagaatgtgggttttgtgttctgaagcatactgaagcaagtgactttaggaatttaaaaaaatggtacaactcaccttattttgagctcacggataatgaaaattgattatgttgttaataatcagaatatagcaccctattccaatataactccttatccaaattcaagtagcctgcagctggaagcatacttctttggagttaaacctccaaggagggattcagaagatcatggcatatgagaggcaagactagattgcagctcaggacagagcagcatgcagcagcttgcattgtgaattttagctccagatcctgagaggacccacagaccctctgatggaagtggacttctcctgcaggaccggggagacaccccaaatattgtgagttgccccaaatgcggaagtggtacagggagaccctcctctaccgaatgcgcagtcccactggagcagctgaagttttgcttgcgggagaagtttctgactttacctcaagctgagtcaagttagagagctgagcaaaatacaggggtggaggaagcagcagaaaggccctgggagctcgctgagtccccaagcagcccattcctgcctggcaccacagggatccatagggagggtggccagaggagcagggggtaaaactccacagggagaaggaaatctctagctgaactttgtaacaatttgaaaggggcaagaagcttcctggccggaactcgggggagggtgcaaatcgggcgtacagacttcacaggcagaggaagaactaaagcccttttctctcccagctgggaggaggatagccttgggcaagttttcaagcccatcttgccctctgcctggaaacagactcagggctgttgaggtgggcagggtgggagtgagacaagcccttcggtttgtgggggagctgggtgaggcttgtgactgccggctttcccctacttgcctgacaacctgcatgactcagcggagacagccataatcctcctaggtgcacaactccagtgacctgggaatctcactcccatttccccccagcagcctcagcaagacttgcccaaggagagtctgagctcagacatgcctagcctcacccgcacctgatggtcctttcctatccacgctggtagcataagacaaaggacataatcttgggaattctagggctccgccctccactggttcctctccacactactatagctgatgcttcctgggaagtaccaccttctggcaggaggccaaccagcacaaagataaagcattaaaccaccaagactaaggaccctcatggagtccattgcactgtccaccacctccaccagaacaagcactggtatacatggctgagagacccatagatggttcacgtcacaggactctgtgcagacaacccccagtaccagcccagagctgggtagactaattgggtggctagacccagaagagagaaaacaaccactgcagtttagctcataggaagccacatccataggaaaagggggagagtactacatcaaaggaacacccagtgggacaaaagaatctgaacaacagccttcagccctataccttccctctgacagagcctacccaaatgagaagaaaccagaaaaccaaccctggtaataggacaaaacaaggctcttcaacacctcccaaaatcacactagttcaccagcaatggatccaaaccaagaagaaatcctgatttacttgaaaaagaattcaagaagttagttattaagcttatcagggagggaccagaagaaggtgaagctcaatgcaaggaaatctaaaaaatgatataagaagtgaagagagaaatactcatggaaatagatagcttaaggaaaaaacaataaaaaattcaggaaactttggacacacttttagaaatgtgaaatgctctggaaagtctcagcaatagaattgaacaagtagaagaaagaactttagagctcaaagacaaggtcctcagattaacccaatccaacaaagacaaagaaagaagaataagatgcagccataaaaaaggatgagttcatgtcctttgcagagacatggatgaagctggaaaccatcattctaagcaaactattacaaggacagaaaaccaaacaccacatgttctcactcataggtgggagctgaacaacaagaacacatgaacacaggcgggggggaacatcacacatcagagcctgtcagggggtggggggccgggggagagatagcattaggagaaacacctaatgtaaatgacgagttgatgggtgcagcaaaccaacatggcacatgtatacctatgtaacaaacccgcacattgtgcacatgtaccccagaacttaaagcataataataaaaaaaagaaaaaagaataatatgaacaaagcctccaagaaatctggaattgtgttaaacaaccaaatataagaataattgttgttcctgaggaagaagacaattctaaaagcttagaaaacatacttgggggaataatggaggaaaacatccctggccttgtgagatactagacagccatatacaagaagcataaagaacacctgggaaattcactgcaaaaagatcttcacctaggcacattgtcatcagattatccaaagttaagaccaaggaaagaatcttaatagctgtgagacagaagcacaaaggaaaacctatcagattaatggcagatttctcagcagaaaccctacaagctagaagggattggggcactatcttcagcctcctcaaacaaaacattttatcggccaagaattttgtatccagcaaaactaagcatcatatatgaaggaaagatacagttgttttcagacaaataaatgctgagcgaattcaccattatcaaactaccactataagaactgctaaaaggaaccctaaattttgaaacaaatcctggaaacacattgaaacagaacgtctttaaagaataaatcacatagggcctgtaaaacaaaaatacaatttaaaaagcaaaaacaacaaacaaaaaaccaaaccacagaggcaacaaagagcatgatggaagcaacagtacatcacatttcaatactaacattgaatgtaaatggcctaaatgctctacttaaaagatacagaaccacagagtgggtaagaattcaccaactaactatctactgccttcaagagactcacctaacacataaggacttacacagaattaaagtaaaagaatggaaaggggcattttgtgcaaatggacaccaaaatcgagcaggggtaactattcttatatcagaaaaaaacaaacaaacactttaaagcaacagcagttaaaagagacaaagagggacattatataatggtaaaaggccttgtccaacaggaaaatatcacaatcttaaacatatatgcacctaacactggagatcacaaacttataaaacaattactaatagtcctaagaaatgagatagacagcaacgcaataatagtgggggacttcaatactccactgacagcactagacaggtcatcaagacggaaagtcaacaaagaagcaatggatttaaactatactttggaacaaatggacctaacagatatatacaaaacatttcatccaacaacctcagaatacacattttattcaacagcatatggaactttctccaagatagaccatatgataggccataaaataagcctcaataaatttaagaaaattgaaattatatcaagtactctctcagaccacagtgaaataaaactggaaatcaactctaaaaggaatcttcaaaaccattcaaatacatggaaattaaataacctgctcctgaacgagcattgggtcaaaaacaaaatcaagatggaagtttaaaaattctttgaactgaatgccaataacgacacaaccaatcaaaacctctgggatacaacaaaggcagtgctaagagtaaagttcatagccataaatgcctacatcaaaaagcttgaaaaagcacagacaacctaaagtcacatctcaaggaactagagaaacaagaacaaacaaaacctaaacccagtacaagaagaaaataaccaagagcagaactaaataaaattataaccaaaaaaaagataaatgaaacaaaaagctgatcctttgagaacataaataaaatagaccattagcaagattaaccaagaaaagaagagagaaaatccaaataacctcactaaaaaacaaaacaggagatattacaactgacaccactgaaatacaaaagatcatttaaggctactatgaacacctttatgtacataaactagaaaacctagaagagatggataaattcctggaaaaatacaatcctcgtggcctaaatcaggaagaattagatatgctgaacagaccaataacaagtagtgagattgaaatagtaattaagaaattataaaccaaaaaaagtccaggaccagatggattcacagcagaattctaccagacattcaaagaagatttggtatcaatccttttgacactattccacaagatagagaagaaggaaccctccttaattcattttatgacgccaacatcaccctaataccaaaaccagggaggacacaaccaaaacaacaacaacaaaaacaaacaaacaaacaaacagaaaaaacactacagaccgatannnnnnnnnnnnnnnnnnnnactacagaccgatatccttgatgaacatagatgctaaaatccttaacaaaatactagctaactgaatccaataacataaaaaagataatccaccatgattaagtgggtttcataccagggatgcagggatggtttaacatatgcaagtcaataaatgtgatacaccacataaacagaattaaaaacaaaaatcacatgaccctctcaatagatgcagaaaaagcatttgacaagatccagtattgctttatgattaaaactctcagcaaaattggcatacaagggacataccttaatgtaataaaagccacctatgacaaacccatatccaacataatactgaatgaggaaaagttgaaagcattccttctgagtactggaaaaagacaaggatgcccactctcaccacttcttttcaacatagtactagaagtcctatccagagcaataagacaagagaaaaaaataaagggcatccaaacaagtaaagaggaagtcaaactgtcaccgtttgctgatgatatgatcatttaccttgaaaaccctaagtaaggactcctccaaaaagctcctagaactgataaaagaattcagcaaagtttctggatacaagattaatgtacacaaatcagtagctcttctatacaccaacagcgaccaagtggagaatcacatcaagaactcaatcccttttataatagctgaaaaaaaaatacttaggaatatacctaacaaaggagtcaaaaaacttctacaaggaaaactacaaaacactgctgaaagaaatcatagatgacacaaacaaatagaaacacatcctatgcccatggatgggcagaatcaatattgtgaaaatgaccataccaccaaaagcaacctacaaattcaatgcaacccccatcagaataccaccatcattcttcacagaattagaaaaaacaattctaaaattcatgtggaatcaaaaaagagcctgcatagccaaagcaagactaaacaaaaaacaaatctggaggcatcacactacctgatttcaaactaccctgtaaggccgtagtcaccaaaacagcatggtactgttataaaaataggcacatagaccaatggaacagaatacagaacccagaaataaacccaaaaacttaaagccaactgatctttgacaaagtaaacaaaaatataaagtggggaaaggacacccttttcaataaatggtgctgggataattggctagccacatgtagaagaataaaactggatcctcatctctcaccttatacaaaaatcaactcaagacggattaaggacttaaacctaagacctgaaactataaaaattctagaagataacactggaaaatccctcctagatattggcttaggcaaggaattcatgaccaagaacccaaaagcaaatgcaataaaaacaaagataaatagctgggacctaattaaactaaagagcttttgcacagcaaaaggaatagtcagcagagtaaacagacaacccacagactgggagaaaatcttcacaatctatacatctgacaaaggactaatatccagaatctacaaccaactcaaacaaatcagtaagtaaaaaacaaataatcccatcaaaaagtgggctaagggcatgaagagacaattctcaaaagaagatacacaaatggccaataaacatgtgaaaaaatgctcaacatcactaacgatcagggaaatgcaaatcaaaaccacaatgcgataccagcttactcctgcaagaatggccataatgaaaaaatcagaaaatagtagatgttggtgtgaatgccatgaacaggggaccctttaaccctgctggcaggaatgttaactatttcaccccccatggaaaacagtgtggagacgcctttttttttttttttttttttttttttttttttttttttgagacagagtctcactctgtcacccaggctggagtatactggtgcaatcatggctcactgcaacctctgcctcctgggttcaagtgattttcctgcctcagcctcctgagtagctgggatcataggcacctgccaccactcccgagtaatttttgtatttttagtagagacgagtttcatcatgttgaccaggctggtctcgaactttctgacttcaggtgatccacccacctcgggctcccaaagtgctgtcattacaggtgtgatccactgtgcccagctgagattccttaaagaactaaaagtagaaccaccatctgatcctgcaatatcactactgggtatctactcaggggaaaagaagtaattattcgaaaaagatacttgcatacacatgtttatagcagcaaaattcacaattggaaaattgtggaaccaacccaaatgcccatcaatcaacgagtggaaaaagaaactgatatatatatatacatatgcatatatgagatatatatgtatgatggaatactacacagccatgaaaaggaatgaattagcagcatttgcagtgacctggatgagactggagactattattctaagtgacgtaactcaagaatgggaaaccaaacatcgtgtgttctcactgatctgtgggagctaagctatgaggacgcaaaggcataagaatgatacaatggactacgggacttgggaggaggcatgggagggggcgagggataaaagattacaagtatggtgcagtgtatacttcttgggaagtgggtgaaccaaaatctcacaaatcactactaaagaacctaatcatgtagccaataccaccagtacttcaaaacttatggaaaaataaaataaaaacctccaaggaactagctgtaggtgggatattggctgtatctcagttccagctccaggaagaagacagatcattgggaacaagaaccctgctgattaaacaatagctgcctaatacggcagcaacacagggtactccaaacttgcttggataattttgtccttttaaaatgtacaattctacttcttaatacaatgcagacaactccatctactttatctagtcataataaaatgaaaatgacttttactcttcgaatacttaaaacttgttcaaagattctttcacatttacttcttttgattcttacaaaagaagggaagacattttatagatgaggaaaccaagatagcacaagacaaatgacttttaaaaaattgtgtaactgaatactgacagcactaggattagaaactgcaaaaatactaatgccagtgtcatttatactacaacaaaccatgggaaaaggaagaggtacagaaaaatatctgcgctcagaagtaggttgcttgcttcttgagatatttcaaaagacaagtgatgagctagtcagcctgtggaactattctacacgtttgtaatcagaacaatttcttttcagggtataatacaccagttctaataatgggtattatgattttaatagctatgtgcttcacaaaatgcagttcaggaaaatggctaagaatatctgaatccatcataaactaggcaattttccctgggataacagtgatagaaatgtttcattatctctcgttctaaatacatgtaaggattaaatccaactacattgttatagcaaaattaatatactgtgtttataacagacacaatttttcaccccctcccattaagatatatgtgaaaatacatatgtggctttaattagcagattataacattctgttccacgcagttagatacatagcacctgtgtcttaaagaataatgaatatattctccaaaatctattcatctatgggtaatgtttccatcactcacactttcgtttacatataa

SEQ ID NO: 167 - DNA, 6240 bp, Homo sapiens
atggggacttcccatccggcgttcctggtcttaggctgtcttctcacagggctgagcctaatcctctgccagctttcattaccctctatccttccaaatgaaaatgaaaaggttgtgcagctgaattcatccttttctctgagatgctttggggagagtgaagtgagctggcagtaccccatgtctgaagaagagagctccgatgtggaaatcagaaatgaagaaaacaacagcggcctttttgtgacggtcttggaagtgagcagtgcctcggcggcccacacagggttgtacacttgctattacaaccacactcagacagaagagaatgagcttgaaggcaggcacatttacatctatgtgccagacccagatgtagcctttgtacctctaggaatgacggattatttagtcatcgtggaggatgatgattctgccattataccttgtcgcacaactgatcccgagactcctgtaaccttacacaacagtgagggggtggtacctgcctcctacgacagcagacagggctttaatgggaccttcactgtagggccctatatctgtgaggccaccgtcaaaggaaagaagttccagaccatcccatttaatgtttatgctttaaaagcaacatcagagctggatctagaaatggaagctcttaaaaccgtgtataagtcaggggaaacgattgtggtcacctgtgctgtttttaacaatgaggtggttgaccttcaatggacttaccctggagaagtgaaaggcaaaggcatcacaatgctggaagaaatcaaagtcccatccatcaaattggtgtacactttgacggtccccgaggccacggtgaaagacagtggagattacgaatgtgctgcccgccaggctaccagggaggtcaaagaaatgaagaaagtcactatttctgtccatgagaaaggtttcattgaaatcaaacccaccttcagccagttggaagctgtcaacctgcatgaagtcaaacattttgttgtagaggtgcgggcctacccacctcccaggatatcctggctgaaaaacaatctgactctgattgaaaatctcactgagatcaccactgatgtggaaaagattcaggaaataaggtatcgaagcaaattaaagctgatccgtgctaaggaagaagacagtggccattatactattgtagctcaaaatgaagatgctgtgaagagctatacttttgaactgttaactcaagttccttcatccattctggacttggtcgatgatcaccatggctcaactgggggacagacggtgaggtgcacagctgaaggcacgccgcttcctgatattgagtggatgatatgcaaagatattaagaaatgtaataatgaaacttcctggactattttggccaacaatgtctcaaacatcatcacggagatccactcccgagacaggagtaccgtggagggccgtgtgactttcgccaaagtggaggagaccatcgccgtgcgatgcctggctaagaatctccttggagctgagaaccgagagctgaagctggtggctcccaccctgcgttctgaactcacggtggctgctgcagtcctggtgctgttggtgattgtgatcatctcacttattgtcctggttgtcatttggaaacagaaaccgaggtatgaaattcgctggagggtcattgaatcaatcagcccggatggacatgaatatatttatgtggacccgatgcagctgccttatgactcaagatgggagtttccaagagatggactagtgcttggtcgggtcttggggtctggagcgtttgggaaggtggttgaaggaacagcctatggattaagccggtcccaacctgtcatgaaagttgcagtgaagatgctaaaacccacggccagatccagtgaaaaacaagctctcatgtctgaactgaagataatgactcacctggggccacatttgaacattgtaaacttgctgggagcctgcaccaagtcaggccccatttacatcatcacagagtattgcttctatggagatttggtcaactatttgcataagaatagggatagcttcctgagccaccacccagagaagccaaagaaagagctggatatctttggattgaaccctgctgatgaaagcacacggagctatgttattttatcttttgaaaacaatggtgactacatggacatgaagcaggctgatactacacagtatgtccccatgctagaaaggaaagaggtttctaaatattccgacatccagagatcactctatgatcgtccagcctcatataagaagaaatctatgttagactcagaagtcaaaaacctcctttcagatgataactcagaaggccttactttattggatttgttgagcttcacctatcaagttgcccgaggaatggagtttttggcttcaaaaaattgtgtccaccgtgatctggctgctcgcaacgtcctcctggcacaaggaaaaattgtgaagatctgtgactttggcctggccagagacatcatgcatgattcgaactatgtgtcgaaaggcagtacctttctgcccgtgaagtggatggctcctgagagcatctttgacaacctctacaccacactgagtgatgtctggtcttatggcattctgctctgggagatcttttcccttggtggcaccccttaccccggcatgatggtggattctactttctacaataagatcaagagtgggtaccggatggccaagcctgaccacgctaccagtgaagtctacgagatcatggtgaaatgctggaacagtgagccggagaagagaccctccttttaccacctgagtgagattgtggagaatctgctgcctggacaatataaaaagagttatgaaaaaattcacctggacttcctgaagagtgaccatcctgctgtggcacgcatgcgtgtggactcagacaatgcatacattggtgtcacctacaaaaacgaggaagacaagctgaaggactgggagggtggtctggatgagcagagactgagcgctgacagtggctacatcattcctctgcctgacattgaccctgtccctgaggaggaggacctgggcaagaggaacagacacagctcgcagacctctgaagagagtgccattgagacgggttccagcagttccaccttcatcaagagagaggacgagaccattgaagacatcgacatgatggacgacatcggcatagactcttcagacctggtggaagacagcttcctgtaactggcggattcgaggggttccttccacttctggggccacctctggatcccgttcagaaaaccactttattgcaatgcggaggttgagaggaggacttggttgatgtttaaagagaagttcccagccaagggcctcggggagcgttctaaatatgaatgaatgggatattttgaaatgaactttgtcagtgttgcctcttgcaatgcctcagtagcatctcagtggtgtgtgaagtttggagatagatggataagggaataataggccacagaaggtgaactttgtgcttcaaggacattggtgagagtccaacagacacaatttatactgcgacagaacttcagcattgtaattatgtaaataactctaaccaaggctgtgtttagattgtattaactatcttctttggacttctgaagagaccactcaatccatccatgtacttccctcttgaaacctgatgtcagctgctgttgaactttttaaagaagtgcatgaaaaaccatttttgaaccttaaaaggtactggtactatagcattttgctatcttttttagtgttaaagagataaagaataataattaaccaaccttgtttaatagatttgggtcatttagaagcctgacaactcattttcatattgtaatctatgtttataatactactactgttatcagtaatgctaaatgtgtaataatgtaacatgatttccctccagagaaagcacaatttaaaacaatccttactaagtaggtgatgagtttgacagtttttgacatttatattaaataacatgtttctctataaagtatggtaatagctttagtgaatcaaatttagttgagcatagagaacaaagtaaaagtagtgttgtccaggaagtcagaatttttaactgtactgaataggttccccaatccatcgtattaaaaaacaattaactgccctctgaaataatgggattagaaacaaacaaaactcttaagtcctaaaagttctcaatgtagaggcataaacctgtgctgaacataacttctcatgtatattacccaatggaaaatataatgatcagcaaaaagactggatttgcagaagtttttttttttttcttcatgcctgatgaaagctttggcgaccccaatatatgtattttttgaatctatgaacctgaaaagggtcagaaggatgcccagacatcagcctccttctttcaccccttaccccaaagagaaagagtttgaaactcgagaccataaagatattctttagtggaggctggatgtgcattagcctggatcctcagttctcaaatgtgtgtggcagccaggatgactagatcctgggtttccatccttgagattctgaagtatgaagtctgagggaaaccagagtctgtatttttctaaactccctggctgttctgatcggccagttttcggaaacactgacttaggtttcaggaagttgccatgggaaacaaataatttgaactttggaacagggttggaattcaaccacgcaggaagcctactatttaaatccttggcttcaggttagtgacatttaatgccatctagctagcaattgcgaccttaatttaactttccagtcttagctgaggctgagaaagctaaagtttggttttgacaggttttccaaaagtaaagatgctacttcccactgtatgggggagattgaactttccccgtctcccgtcttctgcctcccactccataccccgccaaggaaaggcatgtacaaaaattatgcaattcagtgttccaagtctctgtgtaaccagctcagtgttttggtggaaaaaacattttaagttttactgataatttgaggttagatgggaggatgaattgtcacatctatccacactgtcaaacaggttggtgtgggttcattggcattctttgcaatactgcttaattgctgataccatatgaatgaaacatgggctgtgattactgcaatcactgtgctatcggcagatgatgctttggaagatgcagaagcaataataaagtacttgactacctactggtgtaatctcaatgcaagccccaactttcttatccaactttttcatagtaagtgcgaagactgagccagattggccaattaaaaacgaaaacctgactaggttctgtagagccaattagacttgaaatacgtttgtgtttctagaatcacagctcaagcattctgtttatcgctcactctcccttgtacagccttattttgttggtgctttgcattttgatattgctgtgagccttgcatgacatcatgaggccggatgaaacttctcagtccagcagtttccagtcctaacaaatgctcccacctgaatttgtatatgactgcatttgtgggtgtgtgtgtgttttcagcaaattccagatttgtttccttttggcctcctgcaaagtctccagaagaaaatttgccaatctttcctactttctatttttatgatgacaatcaaagccggcctgagaaacactatttgtgactttttaaacgattagtgatgtccttaaaatgtggtctgccaatctgtacaaaatggtcctatttttgtgaagagggacataagataaaatgatgttatacatcaatatgtatatatgtatttctatatagacttggagaatactgccaaaacatttatgacaagctgtatcactgccttcgtttatatttttttaactgtgataatccccacaggcacattaactgttgcacttttgaatgtccaaaatttatattttagaaataataaaaagaaagatacttacatgttcccaaaacaatggtgtggtgaatgtgtgagaaaaactaacttgatagggtctaccaatacaaaatgtattacgaatgcccctgttcatgtttttgttttaaaacgtgtaaatgaagatctttatatttcaataaatgatatataatttaaagtta

SEQ ID NO: 168 - protein, 1089 aa, Homo sapiens
MGTSHPAFLVLGCLLTGLSLILCQLSLPSILPNENEKVVQLNSSFSLRCFGESEVSWQYPMSEEESSDVEIRNEENNSGLFVTVLEVSSASAAHTGLYTCYYNHTQTEENELEGRHIYIYVPDPDVAFVPLGMTDYLVIVEDDDSAIIPCRTTDPETPVTLHNSEGVVPASYDSRQGFNGTFTVGPYICEATVKGKKFQTIPFNVYALKATSELDLEMEALKTVYKSGETIVVTCAVFNNEVVDLQWTYPGEVKGKGITMLEEIKVPSIKLVYTLTVPEATVKDSGDYECAARQATREVKEMKKVTISVHEKGFIEIKPTFSQLEAVNLHEVKHFVVEVRAYPPPRISWLKNNLTLIENLTEITTDVEKIQEIRYRSKLKLIRAKEEDSGHYTIVAQNEDAVKSYTFELLTQVPSSILDLVDDHHGSTGGQTVRCTAEGTPLPDIEWMICKDIKKCNNETSWTILANNVSNIITEIHSRDRSTVEGRVTFAKVEETIAVRCLAKNLLGAENRELKLVAPTLRSELTVAAAVLVLLVIVIISLIVLVVIWKQKPRYEIRWRVIESISPDGHEYIYVDPMQLPYDSRWEFPRDGLVLGRVLGSGAFGKVVEGTAYGLSRSQPVMKVAVKMLKPTARSSEKQALMSELKIMTHLGPHLNIVNLLGACTKSGPIYIITEYCFYGDLVNYLHKNRDSFLSHHPEKPKKELDIFGLNPADESTRSYVILSFENNGDYMDMKQADTTQYVPMLERKEVSKYSDIQRSLYDRPASYKKKSMLDSEVKNLLSDDNSEGLTLLDLLSFTYQVARGMEFLASKNCVHRDLAARNVLLAQGKIVKICDFGLARDIMHDSNYVSKGSTFLPVKWMAPESIFDNLYTTLSDVWSYGILLWEIFSLGGTPYPGMMVDSTFYNKIKSGYRMAKPDHATSEVYEIMVKCWNSEPEKRPSFYHLSEIVENLLPGQYKKSYEKIHLDFLKSDHPAVARMRVDSDNAYIGVTYKNEEDKLKDWEGGLDEQRLSADSGYIIPLPDIDPVPEEEDLGKRNRHSSQTSEESAIETGSSSSTFIKREDETIEDIDMMDDIGIDSSDLVEDSFL

SEQ ID NO: 169 - DNA, 906 bp, Homo sapiens
tgctgactggcttcctgcaagctaccttccctccctgggcctcagtttctctctctgctgagccagaagatgtctaaagacccctttggttccaccctgagagcctgtctccctaacctcaacttcttccccagttcagagaacccaggcatccagctgccccaccccagctctgggtaacggagacggccgaccccggggcacaggcccagcaaggactggggtttcagaagctgccagaggaggagccagaaacagatctcagccccgggctcccagctgcccacctcataggcgctccgctgaaggggcaggggctaggctgggagacgacgaaggaacaggcgtttctgacgagcgggacgcagttctcggacgccgaggggctggcgctcccgcaggacggcctctattacctctactgtctcgtcggctaccggggccgggcgccccctggcggcggggacccccagggccgctcggtcacgctgcgcagctctctgtaccgggcggggggcgcctacgggccgggcactcccgagctgctgctcgagggcgccgagacggtgactccagtgctggacccggccaggagacaagggtacgggcctctctggtacacgagcgtggggttcggcggcctggtgcagctccggaggggcgagagggtgtacgtcaacatcagtcaccccgatatggtggacttcgcgagagggaagaccttctttggggccgtgatggtggggtgagggaatatgagtgcgtggtgcgagtgcgtgaatattgggggcccggacgcccaggaccccatggcagtgggaaaaatgtaggagactgtttggaaattgattttgaacctgatgaaaataaagaatggaaagcttcagtgctgccgataaagatgct

SEQ ID NO: 170 - protein, 210 aa, Homo sapiens
PQLLPQFREPRHPAAPPQLWVTETADPGAQAQQGLGFQKLPEEEPETDLSPGLPAAHLIGAPLKGQGLGWETTKEQAFLTSGTQFSDAEGLALPQDGLYYLYCLVGYRGRAPPGGGDPQGRSVTLRSSLYRAGGAYGPGTPELLLEGAETVTPVLDPARRQGYGPLWYTSVGFGGLVQLRRGERVYVNISHPDMVDFARGKTFFGAVMVG

SEQ ID NO: 171 - DNA, 854 bp, Homo sapiens
cagtctcaatgggggcactggggctggagggcaggggtgggaggctccaggggaggggttccctcctgctagctgtggcaggagccacttctctggtgaccttgttgctggcggtgcctatcactgtcctggctgtgctggccttagtgccccaggatcagggaggactgggtttcagaagctgccagaggaggagccagaaacagatctcagccccgggctcccagctgcccacctcataggcgctccgctgaaggggcaggggctaggctgggagacgacgaaggaacaggcgtttctgacgagcgggacgcagttctcggacgccgaggggctggcgctcccgcaggacggcctctattacctctactgtctcgtcggctaccggggccgggcgccccctggcggcggggacccccagggccgctcggtcacgctgcgcagctctctgtaccgggcggggggcgcctacgggccgggcactcccgagctgctgctcgagggcgccgagacggtgactccagtgctggacccggccaggagacaagggtacgggcctctctggtacacgagcgtggggttcggcggcctggtgcagctccggaggggcgagagggtgtacgtcaacatcagtcaccccgatatggtggacttcgcgagagggaagaccttctttggggccgtgatggtggggtgagggaatatgagtgcgtggtgcgagtgcgtgaatattgggggcccggacgcccaggaccccatggcagtgggaaaaatgtaggagactgtttggaaattgattttgaacctgatgaaaataaagaatggaaagcttcagtgctgccgataaagatgct

SEQ ID NO: 172 - protein, 77 aa, Homo sapiens
MGALGLEGRGGRLQGRGSLLLAVAGATSLVTLLLAVPITVLAVLALVPQDQGGLGFRSCQRRSQKQISAPGSQLPTS

SEQ ID NO: 173 - DNA, 1543 bp, Homo sapiens
atgacaattctaggtacaacttttggcatggttttttctttacttcaagtcgtttctggagaaagtggctatgctcaaaatggagacttggaagatgcagaactggatgactactcattctcatgctatagccagttggaagtgaatggatcgcagcactcactgacctgtgcttttgaggacccagatgtcaacatcaccaatctggaatttgaaatatgtggggccctcgtggaggtaaagtgcctgaatttcaggaaactacaagagatatatttcatcgagacaaagaaattcttactgattggaaagagcaatatatgtgtgaaggttggagaaaagagtctaacctgcaaaaaaatagacctaaccactatagttaaacctgaggctccttttgacctgagtgtcgtctatcgggaaggagccaatgactttgtggtgacatttaatacatcacacttgcaaaagaagtatgtaaaagttttaatgcacgatgtagcttaccgccaggaaaaggatgaaaacaaatggacgcatgtgaatttatccagcacaaagctgacactcctgcagagaaagctccaaccggcagcaatgtatgagattaaagttcgatccatccctgatcactattttaaaggcttctggagtgaatggagtccaagttattacttcagaactccagagatcaataatagctcaggattaagcctatcgtatggcccagtctccccgatcataagaagactctggaacatctttgtaagaaaccaagaaaagaatttaaatgtgagtttcaatcctgaaagtttcctggactgccagattcatagggtggatgacattcaagctagagatgaagtggaaggttttctgcaagatacgtttcctcagcaactagaagaatctgagaagcagaggcttggaggggatgtgcagagccccaactgcccatctgaggatgtagtcatcactccagaaagctttggaagagattcatccctcacatgcctggctgggaatgtcagtgcatgtgacgcccctattctctcctcttccaggtccctagactgcagggagagtggcaagaatgggcctcatgtgtaccaggacctcctgcttagccttgggactacaaacagcacgctgccccctccattttctctccaatctggaatcctgacattgaacccagttgctcagggtcagcccattcttacttccctgggatcaaatcaagaagaagcatatgtcaccatgtccagcttctaccaaaaccagtgaagtgtaagaaacccagactgaacttaccgtgagcgacaaagatgatttaaaagggaagtctagagttcctagtctccctcacagcacagagaagacaaaattagcaaaaccccactacacagtctgcaagattctgaaacattgctttgaccactcttcctgagttcagtggcactcaacatgagtcaagagcatcctgcttctaccatgtggatttggtcacaaggtttaaggtgacccaatgattcagctattt

SEQ ID NO: 174 - protein, 428 aa, Homo sapiens
MTILGTTFGMVFSLLQVVSGESGYAQNGDLEDAELDDYSFSCYSQLEVNGSQHSLTCAFEDPDVNITNLEFEICGALVEVKCLNFRKLQEIYFIETKKFLLIGKSNICVKVGEKSLTCKKIDLTTIVKPEAPFDLSVVYREGANDFVVTFNTSHLQKKYVKVLMHDVAYRQEKDENKWTHVNLSSTKLTLLQRKLQPAAMYEIKVRSIPDHYFKGFWSEWSPSYYFRTPEINNSSGLSLSYGPVSPIIRRLWNIFVRNQEKNLNVSFNPESFLDCQIHRVDDIQARDEVEGFLQDTFPQQLEESEKQRLGGDVQSPNCPSEDVVITPESFGRDSSLTCLAGNVSACDAPILSSSRSLDCRESGKNGPHVYQDLLLSLGTTNSTLPPPFSLQSGILTLNPVAQGQPILTSLGSNQEEAYVTMSSFYQNQ

SEQ ID NO: 175 - DNA, 7348 bp, Homo sapiens
gatgcgtggactgagcccagaccgcaggctgcccgagcccgccccctgcccggctgcggggagccctgagcccaggtccgcgggccgccgccaacgccacgtcctggccctgccggaagaagaggcatggcggccccagcagtgcgctctgctcgaggccgacgcctcggacgaggtgggcatgctgccggcttccccgcgcgccgcctctggcttcgacaacttcttccaggtgcaggagggcgagggccagggctgggagggcgccatggcactggaggcgggctccagccctttcctgccggtgagccccgaggtcatgaagcggcggcgcgggggcctcatcgagcagcgcgacatcatcaaggcccacgaggcgcacaagatgcagagcaccccgcaggcccggcgcaaggaatgggagatggctcgcttcggggaggcggtggtcgccaggccagggtccggcgatggagactcggaccagagcaggaaccggcaaggaacccccgtgccggcctcggggcaggcggccgcctacaagcagacgaaagcacagagggcgcggactatggctttgtacaaccccattcccgtccggcagaactgtttcaccgtcaacagatccctgttcatcttcggagaagataacattgtcaggaaatatgccaagaagctcatcgattggccgccatttgagtacatgatcctggccaccatcattgccaactgcatcgtcctggccctggagcagcatcttcctgaggatgacaagacccccatgtcccgaagactggagaagacagaaccttatttcattgggatcttttgctttgaagctgggatcaaaattgtggccctggggttcatcttccataagggctcttacctccgcaatggctggaatgtcatggacttcatcgtggtcctcagtggcatcctggccactgcaggaacccacttcaatactcacgtggacctgaggaccctccgggctgtgcgtgtcctgcggcctttgaagctcgtgtcagggatacctagcctgcagattgtgttgaagtccatcatgaaggccatggtacctcttctgcagattggccttctgctcttctttgccatcctgatgtttgctatcattggtttggagttctacagtggcaagttacatcgagcatgcttcatgaacaattcaggtattctagaaggatttgacccccctcacccatgtggtgtgcagggctgcccagctggttatgaatgcaaggactggatcggccccaatgatgggatcacccagtttgataacatcctttttgctgtgctgactgtcttccagtgcatcaccatggaagggtggaccactgtgctgtacaataccaatgatgccttaggagccacctggaattggctgtacttcatccccctcatcatcattggatccttctttgttctcaacctagtcctgggagtgctttccggggaatttgccaaagagagagagagagtggagaaccgaagggctttcatgaagctgcggcgccagcagcagattgagcgtgagctgaatggctaccgtgcctggatagacaaagcagaggaagtcatgctcgctgaagaaaataaaaatgctggaacatccgccttagaagtgcttcgaagggcaaccatcaagaggagccggacagaggccatgactcgagactccagtgatgagcactgtgttgatatctcctctgtgggcacacctctggcccgagccagtatcaaaagtgcaaaggtagacggggtctcttatttccggcacaaggaaaggcttctgcgcatctccattcgccacatggttaaatcccaggtgttttactggattgtgctgagccttgtggcactcaacactgcctgtgtggccattgtccatcacaaccagccccagtggctcacccacctcctctactatgcagaatttctgtttctgggactcttcctcttggagatgtccctgaagatgtatggcatggggcctcgcctttattttcactcttcattcaactgctttgattttggggtcacagtgggcagtatctttgaagtggtctgggcaatcttcagacctggtacgtcttttggaatcagtgtcttgcgagccctccggcttctaagaatatttaaaataaccaagtattgggcttccctacggaatttggtggtctccttgatgagctcaatgaagtctatcatcagtttgcttttcctcctcttcctcttcatcgttgtctttgctctcctaggaatgcagttatttggaggcaggtttaactttaatgatgggactccttcggcaaattttgataccttccctgcagccatcatgactgtgttccagatcctgacgggtgaggactggaatgaggtgatgtacaatgggatccgctcccagggtggggtcagctcaggcatgtggtctgccatctacttcattgtgctcaccttgtttggcaactacacgctactgaatgtgttcttggctatcgctgtggataatctcgccaacgcccaggaactgaccaaggatgaacaggaggaagaagaggccttcaaccagaaacatgcactgcagaaggccaaggaggtcagcccgatgtctgcacccaacatgccttcgatcgaaagagacagaaggagaagacaccacatgtcgatgtgggagccacgcagcagccacctgagggagcggaggcgccggcaccacatgtccgtgtgggagcagcgtaccagccagctgaggaagcacatgcagatgtccagccaggaggccctcaacagagaggaggcgccgaccatgaacccgctcaaccccctcaacccgctcagctccctcaacccgctcaatgcccaccccagcctttatcggcgacccagggccattgagggcctggccctgggcctggccctggagaagttcgaggaggagcgcatcagccgtggggggtccctcaagggggatggaggggaccgatccagtgccctggacaaccagaggacccctttgtccctgggccagcgggagccaccatggctggccaggccctgtcatggaaactgtgacccgactcagcaggaggcagggggaggagaggctgtggtgacctttgaggaccgggccaggcacaggcagagccaacggcgcagccggcatcgccgcgtcaggacagaaggcaaggagtcctcttcagcctcccggagcaggtctgccagccaggaacgcagtctggatgaagccatgcccactgaaggggagaaggaccatgagctcaggggcaaccatggtgccaaggagccaacgatccaagaagagagagcccaggatttaaggaggaccaacagtctgatggtgtccagaggctccgggctggcaggaggccttgatgaggctgacacccccctagtcctgccccatcctgagctggaagtggggaagcacgtggtgctgacggagcaggagccagaaggcagcagtgagcaggccctgctggggaatgtgcagctagacatgggccgggtcatcagccagagcgagcctgacctctcctgcatcacggccaacacggacaaggccaccaccgagagcaccagcgtcaccgtcgccatccccgacgtggaccccttggtggactcaaccgtggtgcacattagcaacaagacggatggggaagccagtcccttgaaggaggcagagatcagagaggatgaggaggaggtggagaagaagaagcagaagaaggagaagcgtgagacaggcaaagccatggtgccccacagctcaatgttcatcttcagcaccaccaacccgatccggagggcctgccactacatcgtgaacctgcgctactttgagatgtgcatcctcctggtgattgcagccagcagcatcgccctggcggcagaggaccccgtcctgaccaactcggagcgcaacaaagtcctgaggtattttgactatgtgttcacgggcgtgttcacctttgagatggttataaagatgatagaccaaggcttgatcctgcaggatgggtcctacttccgagacttgtggaacatcctggactttgtggtggtcgttggcgcattggtggcctttgctctggcgaacgctttgggaaccaacaaaggacgggacatcaagaccatcaagtctctgcgggtgctccgagttctaaggccactgaaaaccatcaagcgcttgcccaagctcaaggccgtcttcgactgcgtagtgacctccttgaagaatgtcttcaacatactcattgtgtacaagctcttcatgttcatctttgctgtcatcgcagttcagctcttcaagggaaagttcttttattgcacggacagttccaaggacacagagaaggagtgcataggcaactatgtagatcatgagaaaaacaagatggaggtgaagggccgggaatggaagcgccatgaattccactacgacaacattatctgggccctgctgaccctcttcaccgtctccacaggggaaggatggcctcaagttctgcagcactctgtagatgtgacagaggaagaccgaggcccaagccgcagcaaccgcatggagatgtctatcttttatgtagtctactttgtggtcttccccttcttctttgtcaatatctttgtggctctcatcatcatcaccttccaggagcaaggggataagatgatggaggagtgcagcctggagaagaatgagagggcgtgcatcgacttcgccatcagcgccaaacctctcacccgctacatgccgcagaacagacacaccttccagtaccgcgtgtggcactttgtggtgtctccgtcctttgagtacaccattatggccatgatcgccttgaatactgttgtgctgatgatgaagtattattctgctccctgtacctatgagctggccctgaagtacctgaatatcgccttcaccatggtgttttccctggaatgtgtcctgaaggtcatcgcttttggctttttgaactatttccgagacacctggaatatctttgacttcatcaccgtgattggcagtatcacagaaattatcctgacagacagcaagctggtgaacaccagtggcttcaatatgagctttctgaagctcttccgagctgcccgcctcataaagctcctgcgtcagggctataccatacgcattttgctgtggacctttgtgcagtcctttaaggccctcccttatgtctgccttttaattgccatgcttttcttcatttatgccatcattgggatgcaggtatttggaaacataaaattagacgaggagagtcacatcaaccggcacaacaacttccggagtttctttgggtccctaatgctactcttcaggagtgccacaggtgaggcctggcaggagattatgctgtcatgccttggggagaagggctgtgagcctgacaccaccgcaccatcagggcagaacgagaacgaacgctgcggcaccgatctggcctacgtgtactttgtctccttcatcttcttctgctccttcttgatgctcaacctgtttgtggccgtcatcatggacaactttgagtacctgactcgggactcctccatcctggggcctcaccacttggacgagtttgtccgcgtctgggcagaatatgaccgagcagcatgtggccgcatccattacactgagatgtatgaaatgctgactctcatgtcacctccgctaggcctcggcaagagatgtccctccaaagtggcatataagaggttggtcctgatgaacatgccagtagctgaggacatgacggtccacttcacctccacacttatggctctgatccggacagctctggacattaaaattgccaaaggtggtgcagacaggcagcagctagactcagagctacaaaaggagaccctagccatctggcctcacctatcccagaagatgctggatctgcttgtgcccatgcccaaagcctctgacctgactgtgggcaaaatctatgcagcaatgatgatcatggactactataagcagagtaaggtgaagaagcagaggcagcagctggaggaacagaaaaatgcccccatgttccagcgcatggagccttcatctctgcctcaggagatcattgctaatgccaaagccctgccttacctccagcaggaccccgtttcaggcctgagtggccggagtggatacccttcgatgagtccactctctccccaggatatattccagttggcttgtatggaccccgccgatgacggacagttccaagaacggcagtctctggtggtgacagaccctagctccatgagacgttcattttccactattcgggataagcgttcaaattcctcgtggttggaggaattctccatggagcgaagcagtgaaaatacctacaagtcccgtcgccggagttaccactcctccttgcggctgtcagcccaccgcctgaactctgattcaggccacaagtctgacactcaccgctcagggggcagggagcggggacgatcaaaagagcgaaagcatcttctctctcctgatgtctcccgctgcaattcagaagagcgagggacccaggctgactgggagtccccagagcgccgtcaatccaggtcacccagtgagggcaggtcacagacgcccaacagacagggcacaggttccctaagtgagagctccatcccctctgtctctgacaccagcaccccaagaagaagtcgtcggcagctcccacccgtcccgccaaagccccggcccctcctttcctacagctccctgattcgacacgcgggcagcatctctccacctgctgatggaagcgaggagggctccccgctgacctcccaagctctggagagcaacaatgcttgcctgaccgagtcttccaactctccgcacccccagcagagccaacatgcctccccacagcgctacatctccgagccctacttggccctgcacgaagactcccacgcctcagactgtggtgaggaggagacgctcactttcgaagcagccgtggctactagcctgggccgttccaacaccatcggctcagccccacccctgcggcatagctggcagatgcccaacgggcactatcggcggcggaggcgcggggggcctgggccaggcatgatgtgtggggctgtcaacaacctgctaagtgacacggaagaagatgacaaatgctagaggctgctcccccctccgatgcatgctcttctctcacatggagaaaaccaagacagaattgggaagccagtgcggcccgggggggaggaagagggaaaaggaagatggaag

SEQ ID NO: 176 - protein, 2270 aa, Homo sapiens
MARFGEAVVARPGSGDGDSDQSRNRQGTPVPASGQAAAYKQTKAQRARTMALYNPIPVRQNCFTVNRSLFIFGEDNIVRKYAKKLIDWPPFEYMILATIIANCIVLALEQHLPEDDKTPMSRRLEKTEPYFIGIFCFEAGIKIVALGFIFHKGSYLRNGWNVMDFIVVLSGILATAGTHFNTHVDLRTLRAVRVLRPLKLVSGIPSLQIVLKSIMKAMVPLLQIGLLLFFAILMFAIIGLEFYSGKLHRACFMNNSGILEGFDPPHPCGVQGCPAGYECKDWIGPNDGITQFDNILFAVLTVFQCITMEGWTTVLYNTNDALGATWNWLYFIPLIIIGSFFVLNLVLGVLSGEFAKERERVENRRAFMKLRRQQQIERELNGYRAWIDKAEEVMLAEENKNAGTSALEVLRRATIKRSRTEAMTRDSSDEHCVDISSVGTPLARASIKSAKVDGVSYFRHKERLLRISIRHMVKSQVFYWIVLSLVALNTACVAIVHHNQPQWLTHLLYYAEFLFLGLFLLEMSLKMYGMGPRLYFHSSFNCFDFGVTVGSIFEVVWAIFRPGTSFGISVLRALRLLRIFKITKYWASLRNLVVSLMSSMKSIISLLFLLFLFIVVFALLGMQLFGGRFNFNDGTPSANFDTFPAAIMTVFQILTGEDWNEVMYNGIRSQGGVSSGMWSAIYFIVLTLFGNYTLLNVFLAIAVDNLANAQELTKDEQEEEEAFNQKHALQKAKEVSPMSAPNMPSIERDRRRRHHMSMWEPRSSHLRERRRRHHMSVWEQRTSQLRKHMQMSSQEALNREEAPTMNPLNPLNPLSSLNPLNAHPSLYRRPRAIEGLALGLALEKFEEERISRGGSLKGDGGDRSSALDNQRTPLSLGQREPPWLARPCHGNCDPTQQEAGGGEAVVTFEDRARHRQSQRRSRHRRVRTEGKESSSASRSRSASQERSLDEAMPTEGEKDHELRGNHGAKEPTIQEERAQDLRRTNSLMVSRGSGLAGGLDEADTPLVLPHPELEVGKHVVLTEQEPEGSSEQALLGNVQLDMGRVISQSEPDLSCITANTDKATTESTSVTVAIPDVDPLVDSTVVHISNKTDGEASPLKEAEIREDEEEVEKKKQKKEKRETGKAMVPHSSMFIFSTTNPIRRACHYIVNLRYFEMCILLVIAASSIALAAEDPVLTNSERNKVLRYFDYVFTGVFTFEMVIKMIDQGLILQDGSYFRDLWNILDFVVVVGALVAFALANALGTNKGRDIKTIKSLRVLRVLRPLKTIKRLPKLKAVFDCVVTSLKNVFNILIVYKLFMFIFAVIAVQLFKGKFFYCTDSSKDTEKECIGNYVDHEKNKMEVKGREWKRHEFHYDNIIWALLTLFTVSTGEGWPQVLQHSVDVTEEDRGPSRSNRMEMSIFYVVYFVVFPFFFVNIFVALIIITFQEQGDKMMEECSLEKNERACIDFAISAKPLTRYMPQNRHTFQYRVWHFVVSPSFEYTIMAMIALNTVVLMMKYYSAPCTYELALKYLNIAFTMVFSLECVLKVIAFGFLNYFRDTWNIFDFITVIGSITEIILTDSKLVNTSGFNMSFLKLFRAARLIKLLRQGYTIRILLWTFVQSFKALPYVCLLIAMLFFIYAIIGMQVFGNIKLDEESHINRHNNFRSFFGSLMLLFRSATGEAWQEIMLSCLGEKGCEPDTTAPSGQNENERCGTDLAYVYFVSFIFFCSFLMLNLFVAVIMDNFEYLTRDSSILGPHHLDEFVRVWAEYDRAACGRIHYTEMYEMLTLMSPPLGLGKRCPSKVAYKRLVLMNMPVAEDMTVHFTSTLMALIRTALDIKIAKGGADRQQLDSELQKETLAIWPHLSQKMLDLLVPMPKASDLTVGKIYAAMMIMDYYKQSKVKKQRQQLEEQKNAPMFQRMEPSSLPQEIIANAKALPYLQQDPVSGLSGRSGYPSMSPLSPQDIFQLACMDPADDGQFQERQSLVVTDPSSMRRSFSTIRDKRSNSSWLEEFSMERSSENTYKSRRRSYHSSLRLSAHRLNSDSGHKSDTHRSGGRERGRSKERKHLLSPDVSRCNSEERGTQADWESPERRQSRSPSEGRSQTPNRQGTGSLSESSIPSVSDTSTPRRSRRQLPPVPPKPRPLLSYSSLIRHAGSISPPADGSEEGSPLTSQALESNNACLTESSNSPHPQQSQHASPQRYISEPYLALHEDSHASDCGEEETLTFEAAVATSLGRSNTIGSAPPLRHSWQMPNGHYRRRRRGGPGPGMMCGAVNNLLSDTEEDDKC

SEQ ID NO: 177 - DNA, 7477 bp, Homo sapiens
gatgcgtggactgagcccagaccgcaggctgcccgagcccgccccctgcccggctgcggggagccctgagcccaggtccgcgggccgccgccaacgccacgtcctggccctgccggaagaagaggcatggcggccccagcagtgcgctctgctcgaggccgacgcctcggacgaggtgggcatgctgccggcttccccgcgcgccgcctctggcttcgacaacttcttccaggtgcaggagggcgagggccagggctgggagggcgccatggcactggaggcgggctccagccctttcctgccggtgagccccgaggtcatgaagcggcggcgcgggggcctcatcgagcagcgcgacatcatcaaggcccacgaggcgcacaagatgcagagcaccccgcaggcccggcgcaaggaatgggagatggctcgcttcggggaggcggtggtcgccaggccagggtccggcgatggagactcggaccagagcaggaaccggcaaggaacccccgtgccggcctcggggcaggcggccgcctacaagcagacgaaagcacagagggcgcggactatggctttgtacaaccccattcccgtccggcagaactgtttcaccgtcaacagatccctgttcatcttcggagaagataacattgtcaggaaatatgccaagaagctcatcgattggccaccatttgagtacatgatcctggccaccatcattgccaactgcatcgtcctggccctggagcagcatcttcctgaggatgacaagacccccatgtcccgaagactggagaagacagaaccttatttcattgggatcttttgctttgaagctgggatcaaaattgtggccctggggttcatcttccataagggctcttacctccgcaatggctggaatgtcatggacttcatcgtggtcctcagtggcatcctggccactgcaggaacccacttcaatactcacgtggacctgaggaccctccgggctgtgcgtgtcctgcggcctttgaagctcgtgtcagggatacctagcctgcagattgtgttgaagtccatcatgaaggccatggtacctcttctgcagattggccttctgctcttctttgccatcctgatgtttgctatcattggtttggagttctacagtggcaagttacatcgagcatgcttcatgaacaattcaggtattctagaaggatttgacccccctcacccatgtggtgtgcagggctgcccagctggttatgaatgcaaggactggatcggccccaatgatgggatcacccagtttgataacatcctttttgctgtgctgactgtcttccagtgcatcaccatggaagggtggaccactgtgctgtacaataccaatgatgccttaggagccacctggaattggctgtacttcatccccctcatcatcattggatccttctttgttctcaacctagtcctgggagtgctttccggggaatttgccaaagagagagagagagtggagaaccgaagggctttcatgaagctgcggcgccagcagcagattgagcgtgagctgaatggctaccgtgcctggatagacaaagcagaggaagtcatgctcgctgaagaaaataaaaatgctggaacatccgccttagaagtgcttcgaagggcaaccatcaagaggagccggacagaggccatgactcgagactccagtgatgagcactgtgttgatatctcctctgtgggcacacctctggcccgagccagtatcaaaagtgcaaaggtagacggggtctcttatttccggcacaaggaaaggcttctgcgcatctccattcgccacatggttaaatcccaggtgttttactggattgtgctgagccttgtggcactcaacactgcctgtgtggccattgtccatcacaaccagccccagtggctcacccacctcctctactatgcagaatttctgtttctgggactcttcctcttggagatgtccctgaagatgtatggcatggggcctcgcctttattttcactcttcattcaactgctttgattttggggtcacagtgggcagtatctttgaagtggtctgggcaatcttcagacctggtacgtcttttggaatcagtgtcttgcgagccctccggcttctaagaatatttaaaataaccaagtattgggcttccctacggaatttggtggtctccttgatgagctcaatgaagtctatcatcagtttgcttttcctcctcttcctcttcatcgttgtctttgctctcctaggaatgcagttatttggaggcaggtttaactttaatgatgggactccttcggcaaattttgataccttccctgcagccatcatgactgtgttccagatcctgacgggtgaggactggaatgaggtgatgtacaatgggatccgctcccagggtggggtcagctcaggcatgtggtctgccatctacttcattgtgctcaccttgtttggcaactacacgctactgaatgtgttcttggctatcgctgtggataatctcgccaacgcccaggaactgaccaaggatgaacaggaggaagaagaggccttcaaccagaaacatgcactgcagaaggccaaggaggtcagcccgatgtctgcacccaacatgccttcgatcgaaagagacagaaggagaagacaccacatgtcgatgtgggagccacgcagcagccacctgagggagcggaggcgccggcaccacatgtccgtgtgggagcagcgtaccagccagctgaggaagcacatgcagatgtccagccaggaggccctcaacagagaggaggcgccgaccatgaacccgctcaaccccctcaacccgctcagctccctcaacccgctcaatgcccaccccagcctttatcggcgacccagggccattgagggcctggccctgggcctggccctggagaagttcgaggaggagcgcatcagccgtggggggtccctcaagggggatggaggggaccgatccagtgccctggacaaccagaggacccctttgtccctgggccagcgggagccaccatggctggccaggccctgtcatggaaactgtgacccgactcagcaggaggcagggggaggagaggctgtggtgacctttgaggaccgggccaggcacaggcagagccaacggcgcagccggcatcgccgcgtcaggacagaaggcaaggagtcctcttcagcctcccggagcaggtctgccagccaggaacgcagtctggatgaagccatgcccactgaaggggagaaggaccatgagctcaggggcaaccatggtgccaaggagccaacgatccaagaagagagagcccaggatttaaggaggaccaacagtctgatggtgtccagaggctccgggctggcaggaggccttgatgaggctgacacccccctagtcctgccccatcctgagctggaagtggggaagcacgtggtgctgacggagcaggagccagaaggcagcagtgagcaggccctgctggggaatgtgcagctagacatgggccgggtcatcagccagagcgagcctgacctctcctgcatcacggccaacacggacaaggccaccaccgagagcaccagcgtcaccgtcgccatccccgacgtggaccccttggtggactcaaccgtggtgcacattagcaacaagacggatggggaagccagtcccttgaaggaggcagagatcagagaggatgaggaggaggtggagaagaagaagcagaagaaggagaagcgtgagacaggcaaagccatggtgccccacagctcaatgttcatcttcagcaccaccaacccgatccggagggcctgccactacatcgtgaacctgcgctactttgagatgtgcatcctcctggtgattgcagccagcagcatcgccctggcggcagaggaccccgtcctgaccaactcggagcgcaacaaagtcctgaggtattttgactatgtgttcacgggcgtgttcacctttgagatggttataaagatgatagaccaaggcttgatcctgcaggatgggtcctacttccgagacttgtggaacatcctggactttgtggtggtcgttggcgcattggtggcctttgctctggcgaacgctttgggaaccaacaaaggacgggacatcaagaccatcaagtctctgcgggtgctccgagttctaaggccactgaaaaccatcaagcgcttgcccaagctcaaggccgtcttcgactgcgtagtgacctccttgaagaatgtcttcaacatactcattgtgtacaagctcttcatgttcatctttgctgtcatcgcagttcagctcttcaagggaaagttcttttattgcacggacagttccaaggacacagagaaggagtgcataggcaactatgtagatcatgagaaaaacaagatggaggtgaagggccgggaatggaagcgccatgaattccactacgacaacattatctgggccctgctgaccctcttcaccgtctccacaggggaaggatggcctcaagttctgcagcactctgtagatgtgacagaggaagaccgaggcccaagccgcagcaaccgcatggagatgtctatcttttatgtagtctactttgtggtcttccccttcttctttgtcaatatctttgtggctctcatcatcatcaccttccaggagcaaggggataagatgatggaggagtgcagcctggagaagaatgagagggcgtgcatcgacttcgccatcagcgccaaacctctcacccgctacatgccgcagaacagacacaccttccagtaccgcgtgtggcactttgtggtgtctccgtcctttgagtacaccattatggccatgatcgccttgaatactgttgtgctgatgatgaagtattattctgctccctgtacctatgagctggccctgaagtacctgaatatcgccttcaccatggtgttttccctggaatgtgtcctgaaggtcatcgcttttggctttttgaactatttccgagacacctggaatatctttgacttcatcaccgtgattggcagtatcacagaaattatcctgacagacagcaagctggtgaacaccagtggcttcaatatgagctttctgaagctcttccgagctgcccgcctcataaagctcctgcgtcagggctataccatacgcattttgctgtggacctttgtgcagtcctttaaggccctcccttatgtctgccttttaattgccatgcttttcttcatttatgccatcattgggatgcaggtatttggaaacataaaattagacgaggagagtcacatcaaccggcacaacaacttccggagtttctttgggtccctaatgctactcttcaggagtgccacaggtgaggcctggcaggagattatgctgtcatgccttggggagaagggctgtgagcctgacaccaccgcaccatcagggcagaacgagaacgaacgctgcggcaccgatctggcctacgtgtactttgtctccttcatcttcttctgctccttcttgatgctcaacctgtttgtggccgtcatcatggacaactttgagtacctgactcgggactcctccatcctggggcctcaccacttggacgagtttgtccgcgtctgggcagaatatgaccgagcagcatgtggccgcatccattacactgagatgtatgaaatgctgactctcatgtcacctccgctaggcctcggcaagagatgtccctccaaagtggcatataagaggttggtcctgatgaacatgccagtagctgaggacatgacggtccacttcacctccacacttatggctctgatccggacagctctggacattaaaattgccaaaggtggtgcagacaggcagcagctagactcagagctacaaaaggagaccctagccatctggcctcacctatcccagaagatgctggatctgcttgtgcccatgcccaaagcctctgacctgactgtgggcaaaatctatgcagcaatgatgatcatggactactataagcagagtaaggtgaagaagcagaggcagcagctggaggaacagaaaaatgcccccatgttccagcgcatggagccttcatctctgcctcaggagatcattgctaatgccaaagccctgccttacctccagcaggaccccgtttcaggcctgagtggccggagtggatacccttcgatgagtccactctctccccaggatatattccagttggcttgtatggaccccgccgatgacggacagttccaagaacggcagtctctggagccagaggttagtgaattaaaaagcgtgcagccctctaaccatggcatctaccttccttcggacacccaggagcatgcgggatctgggagggcatcttctatgccacgtctgactgtggatccccaggtggtgacagaccctagctccatgagacgttcattttccactattcgggataagcgttcaaattcctcgtggttggaggaattctccatggagcgaagcagtgaaaatacctacaagtcccgtcgccggagttaccactcctccttgcggctgtcagcccaccgcctgaactctgattcaggccacaagtctgacactcaccgctcagggggcagggagcggggacgatcaaaagagcgaaagcatcttctctctcctgatgtctcccgctgcaattcagaagagcgagggacccaggctgactgggagtccccagagcgccgtcaatccaggtcacccagtgagggcaggtcacagacgcccaacagacagggcacaggttccctaagtgagagctccatcccctctgtctctgacaccagcaccccaagaagaagtcgtcggcagctcccacccgtcccgccaaagccccggcccctcctttcctacagctccctgattcgacacgcgggcagcatctctccacctgctgatggaagcgaggagggctccccgctgacctcccaagctctggagagcaacaatgcttgcctgaccgagtcttccaactctccgcacccccagcagagccaacatgcctccccacagcgctacatctccgagccctacttggccctgcacgaagactcccacgcctcagactgtggtgaggaggagacgctcactttcgaagcagccgtggctactagcctgggccgttccaacaccatcggctcagccccacccctgcggcatagctggcagatgcccaacgggcactatcggcggcggaggcgcggggggcctgggccaggcatgatgtgtggggctgtcaacaacctgctaagtgacacggaagaagatgacaaatgctagaggctgctcccccctccgatgcatgctcttctctcacatggagaaaaccaagacagaattgggaagccagtgcggcccgggggggaggaagagggaaaaggaagatggaag

SEQ ID NO: 178 - protein, 2313 aa, Homo sapiens
MARFGEAVVARPGSGDGDSDQSRNRQGTPVPASGQAAAYKQTKAQRARTMALYNPIPVRQNCFTVNRSLFIFGEDNIVRKYAKKLIDWPPFEYMILATIIANCIVLALEQHLPEDDKTPMSRRLEKTEPYFIGIFCFEAGIKIVALGFIFHKGSYLRNGWNVMDFIVVLSGILATAGTHFNTHVDLRTLRAVRVLRPLKLVSGIPSLQIVLKSIMKAMVPLLQIGLLLFFAILMFAIIGLEFYSGKLHRACFMNNSGILEGFDPPHPCGVQGCPAGYECKDWIGPNDGITQFDNILFAVLTVFQCITMEGWTTVLYNTNDALGATWNWLYFIPLIIIGSFFVLNLVLGVLSGEFAKERERVENRRAFMKLRRQQQIERELNGYRAWIDKAEEVMLAEENKNAGTSALEVLRRATIKRSRTEAMTRDSSDEHCVDISSVGTPLARASIKSAKVDGVSYFRHKERLLRISIRHMVKSQVFYWIVLSLVALNTACVAIVHHNQPQWLTHLLYYAEFLFLGLFLLEMSLKMYGMGPRLYFHSSFNCFDFGVTVGSIFEVVWAIFRPGTSFGISVLRALRLLRIFKITKYWASLRNLVVSLMSSMKSIISLLFLLFLFIVVFALLGMQLFGGRFNFNDGTPSANFDTFPAAIMTVFQILTGEDWNEVMYNGIRSQGGVSSGMWSAIYFIVLTLFGNYTLLNVFLAIAVDNLANAQELTKDEQEEEEAFNQKHALQKAKEVSPMSAPNMPSIERDRRRRHHMSMWEPRSSHLRERRRRHHMSVWEQRTSQLRKHMQMSSQEALNREEAPTMNPLNPLNPLSSLNPLNAHPSLYRRPRAIEGLALGLALEKFEEERISRGGSLKGDGGDRSSALDNQRTPLSLGQREPPWLARPCHGNCDPTQQEAGGGEAVVTFEDRARHRQSQRRSRHRRVRTEGKESSSASRSRSASQERSLDEAMPTEGEKDHELRGNHGAKEPTIQEERAQDLRRTNSLMVSRGSGLAGGLDEADTPLVLPHPELEVGKHVVLTEQEPEGSSEQALLGNVQLDMGRVISQSEPDLSCITANTDKATTESTSVTVAIPDVDPLVDSTVVHISNKTDGEASPLKEAEIREDEEEVEKKKQKKEKRETGKAMVPHSSMFIFSTTNPIRRACHYIVNLRYFEMCILLVIAASSIALAAEDPVLTNSERNKVLRYFDYVFTGVFTFEMVIKMIDQGLILQDGSYFRDLWNILDFVVVVGALVAFALANALGTNKGRDIKTIKSLRVLRVLRPLKTIKRLPKLKAVFDCVVTSLKNVFNILIVYKLFMFIFAVIAVQLFKGKFFYCTDSSKDTEKECIGNYVDHEKNKMEVKGREWKRHEFHYDNIIWALLTLFTVSTGEGWPQVLQHSVDVTEEDRGPSRSNRMEMSIFYVVYFVVFPFFFVNIFVALIIITFQEQGDKMMEECSLEKNERACIDFAISAKPLTRYMPQNRHTFQYRVWHFVVSPSFEYTIMAMIALNTVVLMMKYYSAPCTYELALKYLNIAFTMVFSLECVLKVIAFGFLNYFRDTWNIFDFITVIGSITEIILTDSKLVNTSGFNMSFLKLFRAARLIKLLRQGYTIRILLWTFVQSFKALPYVCLLIAMLFFIYAIIGMQVFGNIKLDEESHINRHNNFRSFFGSLMLLFRSATGEAWQEIMLSCLGEKGCEPDTTAPSGQNENERCGTDLAYVYFVSFIFFCSFLMLNLFVAVIMDNFEYLTRDSSILGPHHLDEFVRVWAEYDRAACGRIHYTEMYEMLTLMSPPLGLGKRCPSKVAYKRLVLMNMPVAEDMTVHFTSTLMALIRTALDIKIAKGGADRQQLDSELQKETLAIWPHLSQKMLDLLVPMPKASDLTVGKIYAAMMIMDYYKQSKVKKQRQQLEEQKNAPMFQRMEPSSLPQEIIANAKALPYLQQDPVSGLSGRSGYPSMSPLSPQDIFQLACMDPADDGQFQERQSLEPEVSELKSVQPSNHGIYLPSDTQEHAGSGRASSMPRLTVDPQVVTDPSSMRRSFSTIRDKRSNSSWLEEFSMERSSENTYKSRRRSYHSSLRLSAHRLNSDSGHKSDTHRSGGRERGRSKERKHLLSPDVSRCNSEERGTQADWESPERRQSRSPSEGRSQTPNRQGTGSLSESSIPSVSDTSTPRRSRRQLPPVPPKPRPLLSYSSLIRHAGSISPPADGSEEGSPLTSQALESNNACLTESSNSPHPQQSQHASPQRYISEPYLALHEDSHASDCGEEETLTFEAAVATSLGRSNTIGSAPPLRHSWQMPNGHYRRRRRGGPGPGMMCGAVNNLLSDTEEDDKC

SEQ ID NO: 179 - DNA, 2106 bp, Homo sapiens
gggtagaatccgccaagctttgagagaaggctgtgactgctgtgctctgggcgccagctcgctccagggagtgatgggaatcctgtcattcttacctgtccttgccactgagagtgactgggctgactgcaagtccccccagccttggggtcatatgcttctgtggacagctgtgctattcctggctcctgttgctgggacacctgcagctcccccaaaggctgtgctgaaactcgagccccagtggatcaacgtgctccaggaggactctgtgactctgacatgccgggggactcacagccctgagagcgactccattcagtggttccacaatgggaatctcattcccacccacacgcagcccagctacaggttcaaggccaacaacaatgacagcggggagtacacgtgccagactggccagaccagcctcagcgaccctgtgcatctgactgtgctttctgagtggctggtgctccagacccctcacctggagttccaggagggagaaaccatcgtgctgaggtgccacagctggaaggacaagcctctggtcaaggtcacattcttccagaatggaaaatccaagaaattttcccgttcggatcccaacttctccatcccacaagcaaaccacagtcacagtggtgattaccactgcacaggaaacataggctacacgctgtactcatccaagcctgtgaccatcactgtccaagctcccagctcttcaccgatggggatcattgtggctgtggtcactgggattgctgtagcggccattgttgctgctgtagtggccttgatctactgcaggaaaaagcggatttcagctctcccaggataccctgagtgcagggaaatgggagagaccctccctgagaaaccagccaatcccactaatcctgatgaggctgacaaagttggggctgagaacacaatcacctattcacttctcatgcacccggatgctctggaagagcctgatgaccagaaccgtatttagtctccattgtcttgcattgggatttgagaagaaaatcagagagggaagatctggtatttcctggcctaaattccccttggggaggacagggagatgctgcagttccaaaagagaaggtttcttccagagtcatctacctgagtcctgaagctccctgtcctgaaagccacagacaatatggtcccaaatgaccgactgcaccttctgtgcttcagctcttcttgacatcaaggctcttccgttccacatccacacagccaatccaattaatcaaaccactgttattaacagataatagcaacttgggaaatgcttatgttacaggttacgtgagaacaatcatgtaaatctatatgatttcagaaatgttaaaatagactaacctctaccagcacattaaaagtgattgtttctgggtgataaaattattgatgatttttattttctttatttttctataaagatcatatattacttttataataaaacattataaaaacaacattctgtttaccttttcaaggctgtattggttggagtgtagactgaactgcctggggtctgtttctcttcagtgatgagactcttaggaaggcaggaatggataggatagggggaggagaggagagatggggatttagaatgtagagtgagtgccccttttcttaaaactgaatacagtcacgcaccacataatgatgtttagttcaacaacagactgcatatatgatggtgatcccataaaattataataccatatttctattgtaccttttctattcctatgtttagatatatgagtacttaccattgtgttacaattgcctaaagtattcagtacagtagcatgctgtacaggtttgtagcctaggggcaataggctatacgctacagcctaggtgtgtagtaggccacaccatttaggtttgtataagtacctgctatgatgttcacacaacaaaattgcctgcatttctcaaaatgtatccccatatttcaacaatgcatgactgtactcttctgccaatgaccttgtattcttgtttccatgtcttcttctctttcctcctatggcaaataaaacactgttttgcaacaca

SEQ ID NO: 180 - protein, 310 aa, Homo sapiens
MGILSFLPVLATESDWADCKSPQPWGHMLLWTAVLFLAPVAGTPAAPPKAVLKLEPQWINVLQEDSVTLTCRGTHSPESDSIQWFHNGNLIPTHTQPSYRFKANNNDSGEYTCQTGQTSLSDPVHLTVLSEWLVLQTPHLEFQEGETIVLRCHSWKDKPLVKVTFFQNGKSKKFSRSDPNFSIPQANHSHSGDYHCTGNIGYTLYSSKPVTITVQAPSSSPMGIIVAVVTGIAVAAIVAAVVALIYCRKKRISALPGYPECREMGETLPEKPANPTNPDEADKVGAENTITYSLLMHPDALEEPDDQNRI

SEQ ID NO: 181 - DNA, 5296 bp, Homo sapiens
ctgccggatagtgctgaagaggagggggcgttccccagaccatggcatctacggaaggtgccaacaatatgcccaagcaggtggaagtgcgaatgcacgacagtcatcttggctcagaggaacccaagcaccggcacctgggcctgcgcctgtgtgacaagctggggaagaatctgctgctcaccctgacggtgtttggtgtcatcctgggagcagtgtgtggagggcttcttcgcttggcatctcccatccaccctgatgtggttatgttaatagccttcccaggggatatactcatgaggatgctaaaaatgctcattctccctctaatcatctccagcttaatcacagggttgtcaggcctggatgctaaggctagtggccgcttgggcacgagagccatggtgtattacatgtccacgaccatcattgctgcagtactgggggtcattctggtcttggctatccatccaggcaatcccaagctcaagaagcagctggggcctgggaagaagaatgatgaagtgtccagcctggatgccttcctggaccttattcgaaatctcttccctgaaaaccttgtccaagcctgctttcaacagattcaaacagtgacgaagaaagtcctggttgcaccaccgccggacgaggaggccaacgcaaccagcgctgttgtctctctgttgaacgagactgtgactgaggtgccggaggagactaagatggttatcaagaagggcctggagttcaaggatgggatgaacgtcttaggtctgatagggtttttcattgcttttggcatcgctatggggaagatgggagatcaggccaagctgatggtggatttcttcaacattttgaatgagattgtaatgaagttagtgatcatgatcatgtggtactctcccctgggtatcgcctgcctgatctgtggaaagatcattgcaatcaaggacttagaagtggttgctaggcaactggggatgtacatggtaacagtgatcataggcctcatcatccacgggggcatctttctccccttgatttactttgtagtgaccaggaaaaaccccttctccttttttgctggcattttccaagcttggatcactgccctgggcaccgcttccagtgctggaactttgcctgtcacctttcgttgcctggaagaaaatctggggattgataagcgtgtgactagattcgtccttcctgttggagcaaccattaacatggatggtacagccctttatgaagcggtagccgccatctttatagcccaaatgaatggtgttgtcctggatggaggacagattgtgactgtaagcctcacagccaccctggcaagcgtcggcgcggccagtatccccagtgccgggctggtcaccatgctcctcattctgacagccgtgggcctgccaacagaggacatcagcctgctggtggctgtggactggctgctggacaggatgagaacttcagtcaatgttgtgggtgactcttttggggctgggatagtctatcacctctccaagtctgagctggataccattgactcccagcatcgagtgcatgaagatattgaaatgaccaagactcaatccatttatgatgacatgaagaaccacagggaaagcaactctaatcaatgtgtctatgctgcacacaactctgtcatagtagatgaatgcaagggcccttttgtgctgagaataaaaccagctattggaacagacctcactgctttgtagagtcagaagttgacctagagaatgggtagcaacaggtcctcagtttctctggagacacccccaatccttgggtgagtgttgaaacctgacaactgactgttagccttgtcatcatcctcactggagatggagatgttgcagtcggagcctcactccttctggggcactgtttcttctcatggcaaccattttgcctgcctggaaacagcctgttgcctttgctagggggcaaatacacacactagccaaggaagttggtccagcacatctctgaggtttctcccccatggacccatggagcgaattccctgagataaatgatcagaaagttggctgtctggtggtttaatactccataagagttacttcccttatagaaagtcatcctttggcatctagatttttctacaaatcaccttaactccctccctttctctttctcctggaaaacctcagcattgcatctccatgttgcacaacacagatcagattatctggtcactatagagatttgtatataaaaaaactacttttttgaggattttgtatattgtttttctatttgttttctacagcttgaggaaagagctggcaaactgtgaatctaacttgatcttgttgccagcagatatattttggcttcctggtaagagtctgtgttaccagggacaatatattgccctctgatcagtattgcaccctaaatccacaaattcctccagcccagtcttacatttttttaaacaaatcccctagcttgtttgctattatttataaagagcattagaaaatgtatttatagacctggatgttatatgtttaatattaatttagcctttaataatgttataggtttgtaactattcttcagaaattataaagaactcagtgtagactgaattaatctatttagtatctgtaattttgcagacatattttcttacagtattttctatgtaaccacacatgtagaattataactaattagagcacaagaagtttcttcagcaatttagagctaccaattgtttcttgactatatagtcacatttgacaaatttaagaacccagtctttagtgatgcaataaacaaaatgaaccattaagaacaaggaattgcttaaatcccttagctggtgaggatatacatctaaataattcatctttctaactcaaggaatggtgctgattttttaaatgtttgacaccaggccttgtttttccagctgagcattctcattttgcttttctctaagactatcaaagacaaggtattaatagtaggattattcctagatcagaatgtttcatacattcctaaaggtttatgtggaaattggcttaggaaaactttgagtagcagagactgaggatgagtgctagagatgaaatcaggacagatttgttgcagttaattcttgccaagcaaattagtggtaaatgtcacattgttatgtgaattgagcacatatttttaaagaaagtttacaaaaaatttttagaaccaactatgaggcaatactgtatcactgggggctgggagtgggggcttagaatcatactgaaattgtttaaaagcagcccaggtagtttctgtcctcaggtgaataacagactatataacttccccgaaaggtaaaacgatagccactgcagagacgaggtgtcttccttccaccaaatactttctgagatggtggtaggagtagtatttttaccgtggtttaaaaagtagtcagttacatagaaagtgtattggtatgtatttgaacctgctcttcattaaacaaacagattagatgtaccctcgactggcaataattgtatctattttcaagtacagctagctgtcaaagcatgaagctcttgtgtatacacactgacacttggttcacgcatgaagaacagtgcctatgcactttgtgtagctataatgtaggtatctaggtgtaatttcagtgaaatggtgtatagatgtattgtaatttaaatgtatatgttatttttggctattcatctaaatgcagtagacatgttgatcggtgttttgcaaacatttctttttccttcttagataactagtcgtgaatcatttctcctctttctcagtgtggcttgggaatatatatgagtgaagaatttatctgtgaatcctttgtactgatgattgtttgaaagtctgtgtgtgtccagcacctttgtaaatacacaattcagagcagggatgggctgggtgtgtgtcctggttcttagtgaaaggtcatctcatgtctgtttaatacatggtgaatgcaactgtggaacttttgattacctagacttaggtaggtttagaatgagaacatccatctacagtcctcctttgcttggtggattgggctcagaggaacaaaaagttagtctgactctgtgcatattagcatcatgtctttagagaaaggtcagcctctctggttgccaaatactcatcatgatgctcatgacttaaaggttctgaggagccttgtctcccttggatttttgagtcagggtacaggaaaaaacattgctgactaactaactgcaaatgcatctgcaggtgaaaccctacgaaagcacagttctggctataaacttcagagttctctgtaaaaaacttagagcactagaagcacaggaatagtgagtgtacagcttatgcggttgtagaggggcaactgatgaacacaggtcccacatatatgagggagtatgacgttctctacctaatatgttctgtgtgcatgttttgaatgattgaagatgggattaactaatgcaagtttacagttgcctcctaaaacacacattctgtataattatcgctaaatacaatgctgtgaggtctatagttcctgtaacccctttctcctccccaaggacagagaagaactagccatgtgctatagggaaccctgagtgccctactcttttcccaagaagggtaaagcctacaatatcatcagggggcatgaagcacattaatttgcagtggctgcttcatatgaggagatatggtggacaggctaatttttccttgaaaatgtggcttcttcaactcctttcaaatttaggatggaatacttcctgaaataaaactgggctttatgcaggattctctttgaaaattcttgtatgtccagaacaaaagataaaactaattgtattcctcacattcacaatccccattggtctgaagtcacgtagcacagagcatctatagcacatagtgtttaaagactaatgaatgcaaaaagataaaatcttcaactaatttttgaattgtttctcatatatgctactagaaaatgccttgttgatgaagcacattttgggtagttgaggtcttttgttttcgcctttagctttctaagctttcttacaatgtggactgattactgtaacatttcacgtgtaaaataactggatattctttatatactggaaataacctgtgaatccaatatttcactaagtgttttaacttttgtgtatatatctctcatcaataaatgtggatttcaatt

SEQ ID NO: 182 - protein, 569 aa, Homo sapiens
MASTEGANNMPKQVEVRMHDSHLGSEEPKHRHLGLRLCDKLGKNLLLTLTVFGVILGAVCGGLLRLASPIHPDVVMLIAFPGDILMRMLKMLILPLIISSLITGLSGLDAKASGRLGTRAMVYYMSTTIIAAVLGVILVLAIHPGNPKLKKQLGPGKKNDEVSSLDAFLDLIRNLFPENLVQACFQQIQTVTKKVLVAPPPDEEANATSAVVSLLNETVTEVPEETKMVIKKGLEFKDGMNVLGLIGFFIAFGIAMGKMGDQAKLMVDFFNILNEIVMKLVIMIMWYSPLGIACLICGKIIAIKDLEVVARQLGMYMVTVIIGLIIHGGIFLPLIYFVVTRKNPFSFFAGIFQAWITALGTASSAGTLPVTFRCLEENLGIDKRVTRFVLPVGATINMDGTALYEAVAAIFIAQMNGVVLDGGQIVTVSLTATLASVGAASIPSAGLVTMLLILTAVGLPTEDISLLVAVDWLLDRMRTSVNVVGDSFGAGIVYHLSKSELDTIDSQHRVHEDIEMTKTQSIYDDMKNHRESNSNQCVYAAHNSVIVDECKGPFVLRIKPAIGTDLTAL

SEQ ID NO: 183 - DNA, 2595 bp, Homo sapiens
ctgccggatagtgctgaagaggagggggcgttccccagaccatggcatctacggaaggtgccaacaatatgcccaagcaggtggaagtgcgaatgcacgacagtcatcttggctcagaggaacccaagcaccggcacctgggcctgcgcctgtgtgacaagctggggaagaatctgctgctcaccctgacggtgtttggtgtcatcctgggagcagtgtgtggagggcttcttcgcttggcatctcccatccaccctgatgtggttatgttaatagccttcccaggggatatactcatgaggatgctaaaaatgctcattctccctctaatcatctccagcttaatcacagggttgtcaggcctggatgctaaggctagtggccgcttgggcacgagagccatggtgtattacatgtccacgaccatcattgctgcagtactgggggtcattctggtcttggctatccatccaggcaatcccaagctcaagaagcagctggggcctgggaagaagaatgatgaagtgtccagcctggatgccttcctggaccttattcgaaatctcttccctgaaaaccttgtccaagcctgctttcaacagattcaaacagtgacgaagaaagtcctggttgcaccaccgccggacgaggaggccaacgcaaccagcgctgttgtctctctgttgaacgagactgtgactgaggtgccggaggagactaagatggttatcaagaagggcctggagttcaaggatgggatgaacgtcttaggtctgatagggtttttcattgcttttggcatcgctatggggaagatgggagatcaggccaagctgatggtggatttcttcaacattttgaatgagattgtaatgaagttagtgatcatgatcatgtggtactctcccctgggtatcgcctgcctgatctgtggaaagatcattgcaatcaaggacttagaagtggttgctaggcaactggggatgtacatggtaacagtgatcataggcctcatcatccacgggggcatctttctccccttgatttactttgtagtgaccaggaaaaaccccttctccttttttgctggcattttccaagcttggatcactgccctgggcaccgcttccagtgctggaactttgcctgtcacctttcgttgcctggaagaaaatctggggattgataagcgtgtgactagattcgtccttcctgttggagcaaccattaacatggatggtacagccctttatgaagcggtagccgccatctttatagcccaaatgaatggtgttgtcctggatggaggacagattgtgactgtaagcctcacagccaccctggcaagcgtcggcgcggccagtatccccagtgccgggctggtcaccatgctcctcattctgacagccgtgggcctgccaacagaggacatcagcctgctggtggctgtggactggctgctggacaggatgagaacttcagtcaatgttgtgggtgactcttttggggctgggatagtctatcacctctccaagtctgagctggataccattgactcccagcatcgagtgcatgaagatattgaaatgaccaagactcaatccatttatgatgacatgaagaaccacagggaaagcaactctaatcaatgtgtctatgctgcacacaactctgtcatagtagatgaatgcaaggtaactctggcagccaatggaaagtcagccgactgcagtgttgaggaagaaccttggaaacgtgagaaataaggatatgagtctcagcaaattcttgaataaactccccagcgtatcctatggtaactgatgatataaacaagctttctttaaaaaggaaaaaaatgcgtatatttctatgtttacttaatctgttagccgaggcttagaggagctcttgtgagtcagtgatgacaggcacggtgctgtgtctttgccaaataatgctttataaccgtctaattttctcacttgtattattatttgaatggatgctgctggaggaatcagttggaattgaagacacgttcttgccagcttcccttttctcccaagatgcagaaatgtggatgctcttttcccaggggacatgagtaaagcagtgtggtacactccagggacttgggaaaatgagcaaacacacagcgtgttattccttaaagtgttctccatgtctcgccttgttatgcacaagagattctattaaaagcctctagaagtaactccccttaaaatgtctagtaaagcttgcacatggattgattaaaagcaaatacctgtcttagggaattctgacaatttatcttccatatgctctttaagtaaaatgtttcaaagacagttttaaagggagccatgctcttaaaggcagttgattaaagaacctgttacatctctgccttaccctgtgtaatctgtgagaacaatggttgaaatttcaaagtatgtttcattattctttctaaatttgataattgattaggaagtattttatatataaccactgtagatattgacaaaagtaagagagcacagtcaacataaagtttaaccagagttaaatattcaaatttatttatgt

SEQ ID NO: 184 - protein, 574 aa, Homo sapiens
MASTEGANNMPKQVEVRMHDSHLGSEEPKHRHLGLRLCDKLGKNLLLTLTVFGVILGAVCGGLLRLASPIHPDVVMLIAFPGDILMRMLKMLILPLIISSLITGLSGLDAKASGRLGTRAMVYYMSTTIIAAVLGVILVLAIHPGNPKLKKQLGPGKKNDEVSSLDAFLDLIRNLFPENLVQACFQQIQTVTKKVLVAPPPDEEANATSAVVSLLNETVTEVPEETKMVIKKGLEFKDGMNVLGLIGFFIAFGIAMGKMGDQAKLMVDFFNILNEIVMKLVIMIMWYSPLGIACLICGKIIAIKDLEVVARQLGMYMVTVIIGLIIHGGIFLPLIYFVVTRKNPFSFFAGIFQAWITALGTASSAGTLPVTFRCLEENLGIDKRVTRFVLPVGATINMDGTALYEAVAAIFIAQMNGVVLDGGQIVTVSLTATLASVGAASIPSAGLVTMLLILTAVGLPTEDISLLVAVDWLLDRMRTSVNVVGDSFGAGIVYHLSKSELDTIDSQHRVHEDIEMTKTQSIYDDMKNHRESNSNQCVYAAHNSVIVDECKVTLAANGKSADCSVEEEPWKREK

SEQ ID NO: 185 - DNA, 1526 bp, Homo sapiens
agacacggggcgtccggctaaggccggggacccagggtggtgggcggggtgtcccgcccgcctgtggaccccgcgcagtaactgcgaacatttcgctttcattttgggccgagctggaggcggcggggccgtcccggaacggctgcggccgggcaccccgggagttaatccgaaagcgccgcaagccccgcgggccggccgcaccgcacgtgtcaccgagaagctgatgtagagagagacacagaaggagacagaaagcaagagaccagagtcccgggaaagtcctgccgcgcctcgggacaattataaaaatgtggccccctgggtcagcctcccagccaccgccctcacctgccgcggccacaggtctgcatccagcggctcgccctgtgtccctgcagtgccggctcagcatgtgtccagcgcgcagcctcctccttgtggctaccctggtcctcctggaccacctcagtttggccagaaacctccccgtggccactccagacccaggaatgttcccatgccttcaccactcccaaaacctgctgagggccgtcagcaacatgctccagaaggccagacaaactctagaattttacccttgcacttctgaagagattgatcatgaagatatcacaaaagataaaaccagcacagtggaggcctgtttaccattggaattaaccaagaatgagagttgcctaaattccagagagacctctttcataactaatgggagttgcctggcctccagaaagacctcttttatgatggccctgtgccttagtagtatttatgaagacttgaagatgtaccaggtggagttcaagaccatgaatgcaaagcttctgatggatcctaagaggcagatctttctagatcaaaacatgctggcagttattgatgagctgatgcaggccctgaatttcaacagtgagactgtgccacaaaaatcctcccttgaagaaccggatttttataaaactaaaatcaagctctgcatacttcttcatgctttcagaattcgggcagtgactattgatagagtgatgagctatctgaatgcttcctaaaaagcgaggtccctccaaaccgttgtcatttttataaaactttgaaatgaggaaactttgataggatgtggattaagaactagggagggggaaagaaggatgggactattacatccacatgatacctctgatcaagtatttttgacatttactgtggataaattgtttttaagttttcatgaatgaattgctaagaagggaaaatatccatcctgaaggtgtttttcattcactttaatagaagggcaaatatttataagctatttctgtaccaaagtgtttgtggaaacaaacatgtaagcataacttattttaaaatatttatttatataacttggtaatcatgaaagcatctgagctaacttatatttatttatgttatatttattaaattatttatcaagtgtatttgaaaaatatttttaagtgttctaaaaataaaagtattgaatt

SEQ ID NO: 186 - protein, 253 aa, Homo sapiens
MWPPGSASQPPPSPAAATGLHPAARPVSLQCRLSMCPARSLLLVATLVLLDHLSLARNLPVATPDPGMFPCLHHSQNLLRAVSNMLQKARQTLEFYPCTSEEIDHEDITKDKTSTVEACLPLELTKNESCLNSRETSFITNGSCLASRKTSFMMALCLSSIYEDLKMYQVEFKTMNAKLLMDPKRQIFLDQNMLAVIDELMQALNFNSETVPQKSSLEEPDFYKTKIKLCILLHAFRIRAVTIDRVMSYLNAS
